(19) United States
(12) Patent Application Publication
(10) Pub. No.: US 2015/0167100 A1
(43) Pub. Date: Jun. 18, 2015

(54) Hereditary Cancer Genes

(71) Applicant: MYRIAD GENETICS, INC., SALT LAKE CITY, UT (US)

(72) Inventors: Kirsten Timms, Salt Lake City, UT (US); Brian Allen, Salt Lake City, UT (US); Anne-Renee Hartman, Salt Lake City, UT (US)

(21) Appl. No.: 14/567,614

(22) Filed: Dec. 11, 2014

Related U.S. Application Data
(60) Provisional application No. 61/914,800, filed on Dec. 11, 2013.

(51) Int. Cl. C12Q 1/68; G06F 19/00; G06F 19/18

(52) U.S. Cl. CPC C12Q 1/6886; G06F 19/18; G06F 19/3431; C12Q 2600/16; C12Q 2600/158; C12Q 2600/156; C12Q 2600/112

(57) ABSTRACT

The disclosure generally relates to a molecular classification of disease predisposition and particularly to molecular markers for cancer predisposition and methods of use thereof.

### RELATED APPLICATIONS

[0001] This application claims priority to U.S. provisional application No. 61/914,800, filed Dec. 11, 2013 the entire contents of which are hereby incorporated by reference.

### FIELD OF THE DISCLOSURE

[0002] The disclosure generally relates to a molecular classification of disease predisposition and particularly to molecular markers for cancer predisposition and methods of use thereof.

### SEQUENCE LISTING

[0003] The instant application was filed with a formal Sequence Listing submitted electronically as a text file. This text file, which is named “1500-02-1PA-2013-12-11-SEQ-LIST-TXT-BGJ_ST25.txt”, was created on Dec. 11, 2013 and is 1,759,042 bytes in size. Its contents are incorporated by reference herein in their entirety.

### BACKGROUND

[0004] Cancer is a major public health problem, accounting for roughly 25% of all deaths in the United States. American Cancer Society, FACTS AND FIGURES 2010. For many types of cancer, up to 10% of cases can be hereditary. Knowing that a patient has an increased risk of cancer due to hereditary factors can help such a patient to take preventive actions to reduce that risk. Thus, there is a significant need for accurate ways of determining whether a particular patient has an increased risk of cancer.

### SUMMARY OF THE DISCLOSURE

[0005] The inventors have developed methods utilizing a panel of genes to detect an increased risk of specific cancers in patients whose germline harbors a deficiency in any of these genes.

[0006] In one aspect the present disclosure provides a method for diagnosing an increased risk of breast and/or ovarian cancer, which comprises: (1) analyzing a patient sample to detect the presence or absence of a germline deficiency in any of a plurality of genes comprising APC, BRCA1, BRCA2, CDKN2A, EPCAM, MLH1, MSH2, MSH6, MUTYH, PALB2, and PMS2; and either (2)(a) diagnosing an increased risk (e.g., increased hereditary risk) of cancer (e.g., the cancer corresponding to such gene in Table 4) in a patient in whose sample a germline deficiency was detected in any of said plurality of genes; or (2)(b) diagnosing no increased risk (e.g., no increased hereditary risk) of cancer (or to no identified increased risk due to the tested genes) in a patient in whose sample no germline deficiency was detected in all of said plurality of genes.

[0007] In another aspect the present disclosure provides a kit comprising: reagents for sequencing DNA molecules comprising one or more exons of a plurality of genes comprising BRCA1, BRCA2, CHEK2, NBN, CDH1, ATM, PALB2, BARD1, MUTYH, CDKN2A, and APC; and instructions for using said reagents. In some embodiments the kit comprises reagents for sequencing a plurality of genes consisting of between 11 and 200 genes, and said plurality of genes comprises BRCA1, BRCA2, CHEK2, NBN, CDH1, ATM, PALB2, BARD1, MUTYH, CDKN2A, and APC. In some embodiments the reagents are PCR primers specific for the plurality of genes. In some embodiments, the reagents are PCR primers specific for the exons (and optionally some certain amount of adjacent intron) of the plurality of genes.

[0008] In some embodiments of the above aspects of the disclosure, the plurality of genes further comprises at least 1, 2, 3, 4, 5, 6, 7, 8, or 9 genes chosen from the group consisting of ATM, BARD1, BMPR1A, CDH1, CDK4, CHEK2, TP53, PTEN, RAD51D, SMAD4, and STK11. In some embodiments the plurality of genes further comprises at least 1, 2, 3, 4, 5, 6, 7, 8, 9, 10, 11, or 12 genes chosen from the group consisting of BLM, CEBPA, FLCN, MEN1, PTCH, RET, SDH5, SDHB, SDHC, SDHD, TMEM127, and VHL. In some embodiments the plurality of genes further comprises at least 1, 2, 3, 4, 5, 6, 7, 8, 9, 10, 11, 12, 13, 14, 15, 16, 17, 18, 19, or 20 genes chosen from the group consisting of BRAF, BRIP1, FANCA, FANCB, FANCC, FANCD2, FANCE, FANCF, FANCG, FANCI, FANCL, FANCM, KRAS, MLH3, MRE11, NBS1, PIK3CA, PMS1, RAD50, and RAD51C. In some embodiments the plurality of genes further comprises at least 1, 2, 3, 4, 5, 6, 7, 8, 9, 10, 11, 12, 13, 14, 15, 16, 17, 18, 19, 20, 21, 22, 23, 24, 25, 26, 27, 28, 29, 30, 31, 32, 33, 34, 35, 36, 37, 38, 39, 40, 41, 42, 43, 44, 45, 46, 47, 48, 49, 50, 51, 52, 53, or 54 genes chosen from the group consisting of APC, ATM, BARD1, BLM, BMPR1A, BRAF, BRCA1, BRCA2, BRIP1, CDH1, CDK4, CDKN2A, CEBPA, CHEK2, FANCA, FANCB, FANCC, FANCD2, FANCE, FANCF, FANCG, FANCI, FANCL, FANCM, FLCN, KRAS, MEN1, MLH1, MLH3, MRE11, MSH2, MSH6, MUTYH, NBS1, PALB2, PIK3CA, PMS1, PMS2, PTCH1, PTEN, RAD50, RAD51C, RAD51D, RET, SDHAF2, SDHB, SDHC, SDHD, SMAD4, STK11, EPCAM, TMEM127, TP53, VHL. In some embodiments the plurality of genes further comprises at least 1, 2, 3, 4, 5, 6, 7, 8, 9, 10, 11, 12, 13, 14, 15, 16, 17, 18, 19, 20, 21, 22, 23, 24, 25, 26, 27, 28, 29, 30, 31, 32, 33, 34, 35, 36, 37, 38, 39, 40, 41, 42, 43, 44, 45, 46, 47, 48, 49, 50, 51, 52, 53, or 54 genes of any of Panels A-R.

[0009] Unless otherwise defined, all technical and scientific terms used herein have the same meaning as commonly understood by one of ordinary skill in the art to which this disclosure pertains. Although methods and materials similar or equivalent to those described herein can be used in the practice or testing of the present disclosure, suitable methods and materials are described below. In case of conflict, the present specification, including definitions, will control. In addition, the materials, methods, and examples are illustrative only and not intended to be limiting.

[0010] Other features and advantages of the disclosure will be apparent from the following Detailed Description, and from the Claims.

### BRIEF DESCRIPTION OF THE DRAWINGS

[0011] FIG. 1 illustrates how a plurality of DNA molecules can comprise a particular DNA sequence with no single molecule comprising all of such sequence.

[0012] FIG. 2 is an illustration of an example of a system useful in certain aspects and embodiments of the disclosure.

[0013] FIG. 3 is a flowchart illustrating an example of a computer-implemented method of the disclosure.

### DETAILED DESCRIPTION

[0014] The present disclosure is based in part on the discovery that hereditary cancer genes, and germline deficiencies in these genes, are responsible for increases in cancer risk attributable to heredity. The inventors have developed methods applying this discovery, including methods utilizing a panel of genes to detect an increased risk of certain cancers (e.g., as indicated in Table 4). “Hereditary cancer gene” and “HCG” herein refer to a gene wherein germline deficiency in the gene confers an increased risk for cancer. The inventors have discovered specific panels (e.g., pluralities) of HCGs that may be tested in a patient to give a comprehensive diagnosis of the patient's hereditary cancer risk. All of the HCGs in Table 1 below form a panel of HCGs (“Panel A”) useful in the disclosure.

TABLE 1

| | | Entrez |
|---|---|---|
| | Entrez Gene | Gene |
| Gene # | Symbol | ID |
| 1 | APC | 324 |
| 2 | ATM | 472 |
| 3 | ATR | 545 |
| 4 | BAP1 | 8314 |
| 5 | | 580 |
| 6 | BLM | 641 |
| 7 | BMPR1A | 657 |
| 8 | BRAF | 673 |
| 9 | BRCA1 | 672 |
| 10 | BRCA2 | 675 |
| 11 | BRIP1 | 83990 |
| 12 | CDH1 | 999 |
| 13 | CDK4 | 1019 |
| 14 | CDKN2A (p16) | 1029 |
| 15 | CEBPA | 1050 |
| 16 | CFTR | 1080 |
| 17 | | 11200 |
| 18 | CTRC | 11330 |
| 19 | ELAC2 | 60528 |
| 20 | EPCAM | 4072 |
| | (TACSTD1) | |
| 21 | FANCA | 2175 |
| 22 | FANCB | 2187 |
| 23 | FANCC | 2176 |
| 24 | FANCD2 | 2177 |
| 25 | FANCE | 2178 |
| 26 | FANCF | 2188 |
| 27 | FANCG | 2189 |
| 28 | FANCI | 55215 |
| 29 | FANCL | 55120 |
| 30 | FANCM | 57697 |
| 31 | FGFR2 | 2263 |
| 32 | FH | 2271 |
| 33 | FLCN | 201163 |
| 34 | HOXB13 | 10481 |
| 35 | HRAS | 3265 |
| 36 | KITLG | 4254 |
| 37 | KRAS | 3845 |
| 38 | MEN1 | 4221 |
| 39 | MITF | 4286 |
| 40 | MLH1 | 4292 |
| 41 | MLH3 | 27030 |
| 42 | MRE11 | 4361 |
| 43 | MSH2 | 4436 |
| 44 | MSH6 | 2956 |
| 45 | MUTYH (MYH) | 4595 |
| 46 | NBS1 (NBN) | 4683 |
| 47 | NE1 | 4763 |
| 48 | NF2 | 4771 |
| 49 | PALB2 | 79728 |
| 50 | PIK3CA | 5290 |
| 51 | PMS1 | 5378 |
| 52 | PMS2 | 5395 |
| 53 | PRSS1 | 5644 |
| 54 | PTCH1 | 5727 |
| 55 | PTEN | 5728 |
| 56 | RAD50 | 10111 |
| 57 | RAD51C | 5889 |
| 58 | RAD51D | 5892 |
| 59 | RB1 | 5925 |
| 60 | RET | 5979 |
| 61 | SDHAF2 | 54949 |
| | (SDH5) | |
| 62 | SDHB | 6390 |
| 63 | SDHC | 6391 |
| 64 | SDHD | 6392 |
| 65 | SMAD4 | 4089 |
| 66 | SPINK1 | 6690 |
| 67 | STK11 | 6794 |
| 68 | TGFB2 | 7042 |
| 69 | TMEM127 | 55654 |
| 70 | TP53 (p53) | 7157 |
| 71 | VHL | 7428 |

[0015] As will be shown in detail throughout this document, subsets of Panel A can also be used in the disclosure. Examples of subsets useful in the present disclosure are shown in Tables 2A to 2D below:

TABLE 2A
Panels B to G

| Gene # | Panel B | Panel C | Panel D | Panel E | Panel F | Panel G |
|---|---|---|---|---|---|---|
| 1 | BRCA1 | BRCA1 | BRCA1 | MLH1 | BRCA1 | BRCA1 |
| 2 | BRCA2 | BRCA2 | BRCA2 | MSH2 | BRCA2 | BRCA2 |
| 3 | MLH1 | MLH1 | CHEK2 | MSH6 | MLH1 | MLH1 |
| 4 | MSH2 | MSH2 | ATM | PMS2 | MSH2 | MSH2 |
| 5 | MSH6 | MSH6 | NBN | BRCA1 | MSH6 | MSH6 |
| 6 | PMS2 | PMS2 | PALB2 | BRCA2 | PMS2 | PMS2 |
| 7 | EPCAM | EPCAM | BARD1 | ATM | EPCAM | EPCAM |
| 8 | MUTYH | MUTYH | BRIP1 | BARD1 | APC | APC |
| 9 | APC | APC | PMS2 | BRIP1 | MUTYH | MUTYH |
| 10 | CDKN2A | CDKN2A | MSH2 | CHEK2 | PALB2 | PALB2 |
| 11 | PALB2 | PALB2 | MSH6 | MUTYH | CDKN2A | CHEK2 |
| 12 | SMAD4 | SMAD4 | TP53 | RAD50 | CDK4 | PTEN |
| 13 | BMPR1A | BMPR1A | MUTYH | EPCAM* | TP53 | STK11 |
| 14 | TP53 | TP53 | | | PTEN | CDH1 |
| 15 | PTEN | PTEN | | | CDH1 | TP53 |
| 16 | STK11 | STK11 | | | STK11 | ATM |
| 17 | CDH1 | CDH1 | | | SMAD4 | RAD51C |
| 18 | NBN1 | NBN1 | | | BMPR1A | RAD51D |
| 19 | CHEK2 | CHEK2 | | | ATM | BRIP1 |
| 20 | RAD51C | RAD51C | | | CHEK2 | BARD1 |
| 21 | RAD5ID | RAD51D | | | RAD51C | BMPR1A |
| 22 | BRIP1 | BRIP1 | | | RAD51D | SMAD4 |
| 23 | BARD1 | BARD1 | | | MLH3 | CDKN2A |
| 24 | ATM | ATM | | | BRIP1 | CDK4 |
| 25 | CDK4 | CDK4 | | | BARD1 | RAD50 |
| 26 | | RAD50* | | | NSB1 | NBN |
| 27 | | MRE11A* | | | RAD50 | MRE11 |
| 28 | | MLH3* | | | MRE11A | MLH3 |
| 29 | | MITF* | | | HOXB13* | |
| 30 | | ELAC2* | | | | |

*Optional in this panel

TABLE 2B
Panels H to M

| Gene | | | | | | | |
|---|---|---|---|---|---|---|---|
| # | Panel H | Panel I | Panel J | Panel K | Panel L | Panel M | Panel N |
| 1 | APC | ATM | APC | BLM | ATR | BRCA1 | BRCA1 |
| 2 | BRCA1 | BMPR1A | ATM | CEBPA | BARD1 | BRCA2 | BRCA2 |
| 3 | BRCA2 | CDH1 | BMPR1A | FLCN | BRAF | MLH1 | MLH1 |
| 4 | CDKN2A | CDK4 | BRCA1 | MEN1 | BRIP1 | MSH2 | MSH2 |
| 5 | EPCAM | CHEK2 | BRCA2 | PTCH | FANCA | MSH6 | MSH6 |
| 6 | MLH1 | HOXB13 | CDH1 | RET | FANCB | PMS2 | PMS2 |
| 7 | MSH2 | TP53 | CDK4 | SDHAF2 | FANCC | EPCAM | EPCAM |
| 8 | MSH6 | PTEN | CDKN2A | SDHB | FANCD2 | MUTYH | MUTYH |
| 9 | MUTYH | SMAD4 | CHEK2 | SDHC | FANCE | APC | APC |
| 10 | PALB2 | STK11 | EPCAM | SDHD | FANCF | CDKN2A | CDKN2A |
| 11 | PMS2 | | MLH1 | TMEM127 | FANCG | PALB2 | PALB2 |
| 12 | | | MSH2 | VHL | FANCI | SMAD4 | SMAD4 |
| 13 | | | MSH6 | | FANCL | BMPR1A | BMPR1A |
| 14 | | | MUTYH | | FANCM | TP53 | TP53 |
| 15 | | | TP53 | | KRAS | PTEN | PTEN |
| 16 | | | PALB2 | | MLH3 | STK11 | STK11 |
| 17 | | | PMS2 | | MRE11 | CDH1 | CDH1 |
| 18 | | | PTEN | | NBS1 | NBN1 | NBN1 |
| 19 | | | SMAD4 | | PIK3CA | CHEK2 | CHEK2 |
| 20 | | | STK11 | | PMS1 | RAD51C | RAD51C |
| 21 | | | | | RAD50 | RAD51D | RAD51D |
| 22 | | | | | RAD51C | BRIP1 | BRIP1 |
| 23 | | | | | | BARD1 | BARD1 |
| 24 | | | | | | ATM | ATM |
| 25 | | | | | | CDK4 | CDK4 |
| 26 | | | | | | | MITF |
| 27 | | | | | | | ELAC2 |

TABLE 2C
Panel O

| | Gene |
|---|---|
| Gene # | Symbol |
| 1 | BRCA1 |
| 2 | BRCA2 |
| 3 | MLH1 |
| 4 | MSH2 |
| 5 | PMS2 |
| 6 | MLH3 |
| 7 | EPCAM |
| 8 | MSH6 |
| 9 | APC |
| 10 | PMS1 |
| 11 | PTEN |
| 12 | STK11 |
| 13 | RET |
| 14 | SDHD |
| 15 | SDHC |
| 16 | SDHB |
| 17 | SDHAF2 |
| 18 | CDH1 |
| 19 | MUTYH |
| 20 | SMAD4 |
| 21 | MEN1 |
| 22 | VHL |
| 23 | BMPR1A |
| 24 | PALB2 |
| 25 | TP53 |
| 26 | FANCL |
| 27 | BLM |
| 28 | CDK4 |
| 29 | CDKN2A |
| 30 | ATM |
| 31 | PTCH1 |
| 32 | CHEK2 |
| 33 | RAD51C |
| 34 | CEBPA |
| 35 | NBS1 |
| 36 | FANCA |
| 37 | FANCC |
| 38 | FANCD2 |
| 39 | FANCE |
| 40 | FANCG |
| 41 | FANCI |
| 42 | FANCM |
| 43 | RAD51D |
| 44 | FANCF |
| 45 | FANCB |
| 46 | BARD1 |
| 47 | RAD50 |
| 48 | MRE11 |
| 49 | BRIP1 |
| 50 | FLCN |
| 51 | TMEM127 |
| 52 | PIK3CA |
| 53 | KRAS |
| 54 | BRAF |
| 55 | HOXB13 |
| 56 | ATR |
| 57 | BAP1 |
| 58 | CFTR |
| 59 | CTRC |
| 60 | FGFR2 |
| 61 | FH |
| 62 | HRAS |
| 63 | KITLG |
| 64 | NF1 |
| 65 | NF2 |
| 66 | PRSS1 |
| 67 | RB1 |
| 68 | SPINK1 |
| 69 | TGFB2 |

TABLE 2D
Panel P

| | Gene |
|---|---|
| Gene # | Symbol |
| 1 | BRCA1 |
| 2 | BRCA2 |
| 3 | MLH1 |
| 4 | MSH2 |
| 5 | MSH6 |
| 6 | PMS2 |
| 7 | EPCAM |
| 8 | APC |
| 9 | MUTYH |
| 10 | PALB2 |
| 11 | CDKN2A |
| 12 | CDK4 |
| 13 | TP53 |
| 14 | PTEN |
| 15 | CDH1 |
| 16 | STK11 |
| 17 | SMAD4 |
| 18 | BMPR1A |
| 19 | ATM |
| 20 | CHEK2 |
| 21 | RAD51C |
| 22 | RAD51D |
| 23 | MLH3 |
| 24 | VHL |
| 25 | MEN1 |
| 26 | RET |
| 27 | NF1 |
| 28 | NF2 |
| 29 | RB1 |
| 30 | PTCH1 |
| 31 | FH |
| 32 | BLM |
| 33 | CEBPA |
| 34 | FLCN |
| 35 | SDHB |
| 36 | SDHC |
| 37 | SDHD |
| 38 | SDHAF2 |
| 39 | TMEM127 |
| 40 | CFTR |
| 41 | PRSS1 |
| 42 | CTRC |
| 43 | SPINK1 |
| 44 | KRAS |
| 45 | BRIP1 |
| 46 | BARD1 |
| 47 | NBS1 |
| 48 | RAD50 |
| 49 | FANCA |
| 50 | FANCB |
| 51 | FANCC |
| 52 | FANCD2 |
| 53 | FANCE |
| 54 | FANCF |
| 55 | FANCG |
| 56 | FANCI |
| 57 | FANCL |
| 58 | FANCM |
| 59 | ATR |
| 60 | HRAS |
| 61 | TGFB2 |
| 62 | FGFR2 |
| 63 | BAP1 |
| 64 | KITLG |
| 65 | BRAF |
| 66 | MRE11 |
| 67 | PIK3CA |
| 68 | PMS1 |
| 69 | HOXB13 |

### ASPECTS OF THE DISCLOSURE

[0016] Accordingly, in one aspect the present disclosure provides a method for sequencing nucleic acids. Generally, the method includes at least the following steps: (1) isolating a plurality of nucleic acid molecules from a sample taken from a patient, each nucleic acid molecule comprising (or consisting of or consisting essentially of) between A and B nucleotides in length, said plurality of nucleic acid molecules comprising (e.g., having nucleotide sequences that together comprise) one or more exons of a plurality of genes consisting of between W and X genes, and said plurality of genes comprising at least two genes in any of Panels A-R; and (2) determining the sequence of said plurality of nucleic acid molecules.

[0017] In another aspect the present disclosure provides a method for diagnosing an increased risk of breast and/or ovarian cancer, which comprises: (1) analyzing a patient sample to detect the presence or absence of a germline deficiency (e.g., mutation) in any of a plurality of genes (e.g., consisting of between W and X genes), said plurality of genes comprising at least two genes in any of Panels A-R; and either (2)(a) diagnosing an increased risk (e.g., increased hereditary risk) of cancer (e.g., the cancer corresponding to the relevant gene in Table 4) in a patient in whose sample a germline deficiency was detected in any of said plurality of genes; or (2)(b) diagnosing no increased risk (e.g., no increased hereditary risk) of cancer (or no identified increased risk due to the tested genes) in a patient in whose sample no germline deficiency was detected in all of said plurality of genes. In some embodiments, the method comprises detecting a germline deficiency in a gene by comparing the sequence determined in (1) with one or more reference sequences, as discussed in more detail below.

[0018] In another aspect the present disclosure provides a method for determining whether a patient has an increased risk of cancer, which comprises: (1) determining whether the patient has a germline deficiency in any of a plurality of genes consisting of between W and X genes, said plurality of genes comprising at least two genes in any of Panels A-R; and either (2)(a) correlating a germline deficiency in any of said plurality of genes to an increased risk (e.g., increased hereditary risk) of cancer, or (2)(b) correlating the absence of a germline deficiency in all of said plurality of genes to no increased risk (e.g., no increased hereditary risk) of cancer. In some embodiments of this aspect, the method also comprises (a) isolating a plurality of nucleic acid molecules from a sample taken from a patient, each nucleic acid molecule comprising (or consisting of or consisting essentially of) between A and B nucleotides in length, and said plurality of nucleic acid molecules comprising (e.g., having nucleotide sequences that together comprise) one or more exons of said plurality of genes and (b) determining the sequence of said plurality of nucleic acid molecules. In some embodiments, the method comprises detecting a germline deficiency in a gene by comparing the sequence determined in (b) with one or more reference sequences, as discussed in more detail below.

[0019] Thus, the disclosure provides a method for treating a patient comprising (1) analyzing a patient sample to detect the presence or absence of a germline deficiency in any of a plurality of genes consisting of between W and X genes, said plurality of genes comprising at least two genes in any of Panels A-R; and either (2)(a) diagnosing an increased risk (e.g., increased hereditary risk) of cancer (e.g., a particular cancer as indicated in Table 4) in a patient in whose sample a germline deficiency was detected in any of said plurality of genes; or (2)(b) diagnosing no increased risk (e.g., no increased hereditary risk) of cancer (or no identified increased risk due to the tested genes) in a patient in whose sample no germline deficiency was detected in all of said plurality of genes; and (3) recommending, prescribing, or administering a treatment to manage (e.g., reduce) the patient's risk of cancer. In some embodiments, the treatment comprises removing all or part of the organ in which the patient has an increased risk of cancer (e.g., mastectomy, salpingo-oophorectomy, hysterectomy, colectomy, prostatectomy, etc.). In some embodiments the treatment comprises preventive drug treatments (e.g., tamoxifen treatment in patients with increased risk of breast or ovarian cancer).

[0020] Another aspect of the present disclosure provides computer program products comprising a computer-usable medium having computer-readable program codes or instructions embodied thereon for enabling a processor to carry out the methods of the disclosure. A related aspect of the present disclosure provides a system for diagnosing an increased likelihood of cancer, the system comprising (1) one or more computer programs for receiving, storing, and/or retrieving test sequence data for a plurality of genes consisting of between W and X genes, said plurality of genes comprising at least two genes in any of Panels A-R; (2) one or more computer programs for querying this test sequence data; (3) optionally one or more computer programs for comparing the test sequence data to one or more reference sequences to determine whether there is a mutation in any of said plurality of genes; (4) one or more computer programs for either (a) diagnosing an increased risk (e.g., increased hereditary risk) of breast and/or ovarian cancer in a patient in whose sample a germline deficiency was detected in any of said plurality of genes, or (b) diagnosing no increased risk (e.g., no increased hereditary risk) of breast and/or ovarian cancer (or no identified increased risk due to the tested genes) in a patient in whose sample no germline deficiency was detected in all of said plurality of genes; and optionally (5) computer program for outputting/displaying this diagnosis. In some embodiments this program for outputting the conclusion may comprise a computer program for informing a health care professional of the conclusion.

[0021] In another aspect the disclosure provides a system for sequencing genes in a sample (e.g., tumor sample), comprising: (1) a sample analyzer for sequencing a plurality of genes consisting of between W and X genes, said plurality of genes comprising at least two genes in any of Panels A-R, wherein the sample analyzer contains (a) the sample which is from a patient, (b) genomic DNA from the sample, (c) transcript RNA from the sample, or (d) DNA synthesized from said genomic DNA; (2) one or more computer programs for receiving test sequence data on the plurality of genes; and (3) one or more computer programs for comparing the sequence data to one or more reference sequences. In some embodiments the system comprises a computer program for determining (including quantifying) the patient's degree of risk of cancer based at least in part on the comparison of the test sequence with said one or more reference sequences. Such program may also compare the patient's determined probability of a particular cancer with a reference probability to determine whether the patient has an increased risk of such cancer.

[0022] In another aspect the disclosure provides methods combining the genetic analysis as described above with analysis of other cancer risk factors, e.g., a patient's family and/or personal history of cancer. In some embodiments the disclosure provides a method for determining a patient's risk of cancer, which comprises: (1)(a) determining whether the patient has a germline deficiency in any of a plurality of genes consisting of between W and X genes, said plurality of genes comprising at least two genes in any of Panels A-R and (1)(b) assigning a first risk level of cancer (e.g., percentage probability of developing cancer (any cancer or a specific cancer or set of cancers) by a certain age) for the patient based on the presence or absence of such germline deficiency; (2)(a) evaluating the patient's personal and family history risk factors for cancer and (2)(b) assigning a second risk level of cancer for the patient based on the risk factors identified in (2)(a); and either (3)(a) assigning (optionally communicating and/or recording) the higher of the first and second risk levels determined in (1)(b) and (2)(b) to the patient, or (3)(b) assigning (optionally communicating and/or recording) a third risk level of cancer to the patient, wherein the third risk level is a combination of the first and second risk levels determined in (1)(b) and (2)(b). In some embodiments, the first and second risk levels are given approximately the same weight (e.g., within 5% or 10%) in assigning the third risk level. In some embodiments the ratio of the weight given to the first level to the weight given to the second risk level is approximately 1:2, 1:3, 1:4, 1:5, 1:6, 1:7, 1:8, 1:9, 1:10, 2:1, 3:1, 4:1, 5:1, 6:1, 7:1, 8:1, 9:1, 10:1, 2:3, 3:4, 4:5, 5:6, 6:7, 7:8, 8:9, 9:10, 10:11, 3:2, 4:3, 5:4, 6:5, 7:6, 8:7, 9:8, 10:9, 11:10, 3:5, 5:7, 7:9, 9:11, 11:9, 9:7, 7:5, or 5:3. In some embodiments, both the first risk level and the second risk level are communicated (e.g., to the healthcare provider, to the patient, etc.). Personal risk factors may include cancer diagnosis (including age at diagnosis), multiple primary cancers, triple negative breast cancer, ovarian cancer, smoking, age of menopause, age of menarche, positive biopsy, positive pap smear, male breast cancer, enlarged prostate, colon polyps, etc. Family risk factors can include a relative (e.g., first or second degree) with early onset (e.g., before 40, 50, or 60 years of age) cancer, particular ancestries (e.g., Ashkenazi Jewish ancestry), relative with multiple primary cancers, relative with male breast cancer, relative with ovarian cancer, relative with triple negative breast cancer, etc.

[0023] In another aspect the disclosure provides compositions for use in the above methods. Such compositions include, but are not limited to: (a) nucleic acid probes hybridizing to a plurality of nucleic acid molecules comprising (e.g., having nucleotide sequences that together comprise) one or more exons of a plurality of genes consisting of between W and X genes, and said plurality of genes comprising at least two genes in any of Panels A-R; (b) nucleic acid primers and primer pairs suitable for selectively amplifying nucleic acids of (a); (c) antibodies binding immunologically to polypeptides encoded by a plurality of genes consisting of between W and X genes, and said plurality of genes comprising at least two genes in any of Panels A-R; (d) a probe set comprising (a), (b) and/or (c); (e) a microarray comprising (a), (b), (c), and/or (d).

[0024] In another aspect the present disclosure provides a kit comprising: reagents for sequencing nucleic acid molecules comprising one or more exons of a plurality of genes comprising a plurality of genes consisting of between W and X genes, said plurality of genes comprising at least two genes in any of Panels A-R; and instructions for using said reagents. In some embodiments the kit comprises (a), (b), (c), (d), and/or (e) in the preceding paragraph. In some embodiments the reagents are PCR primers specific for the plurality of genes. In some embodiments, the reagents are PCR primers specific for the exons (and optionally some certain amount of adjacent intron) of the plurality of genes (optionally also including polymerase enzyme, deoxynucleotides, buffers, etc.). In some embodiments, the reagents are oligonucleotide probes specific for the exons (and optionally some certain amount of adjacent intron) of the plurality of genes. In some embodiments the reagents (e.g., the primers and/or probes) are packaged into an array (e.g., affixed to a solid support, contained within a reaction volume, etc.).

[0025] Several aspects of the disclosure described herein involve a step of correlating a particular assay or analysis result or output (e.g., presence or absence of a germline deficiency in one or more genes of Panel B or Panel N) to some likelihood (e.g., increased, not increased, decreased, etc.) of some clinical feature (e.g., increased risk (e.g., increased hereditary risk) of cancer). Throughout this document, wherever such an aspect is described, an alternative aspect of the disclosure may involve, in addition to or instead of a correlating step, one or both of the following steps: (a) concluding that the patient has or does not have the clinical feature based at least in part on the assay or analysis result; or (b) communicating that the patient has or does not have the clinical feature based at least in part on the assay or analysis result.

[0026] By way of illustration, but not limitation, one aspect described in this document is a method for determining whether a patient has an increased risk of cancer, which comprises: (1) determining whether the patient has a germline deficiency in any of a plurality of genes consisting of between W and X genes, said plurality of genes comprising at least two genes in any of Panels A-R; and either (2)(a) correlating a germline deficiency in any of said plurality of genes to an increased risk (e.g., increased hereditary risk) of cancer, or (2)(b) correlating the absence of a germline deficiency in all of said plurality of genes to no increased risk (e.g., no increased hereditary risk) of cancer (or to no identified increased risk due to the tested genes). According to the preceding paragraph, this description of this aspect is understood to include a description of two alternative related aspects. One such embodiment provides a method for determining whether a patient has an increased risk of cancer, which comprises: (1) determining whether the patient has a germline deficiency in any of a plurality of genes consisting of between W and X genes, said plurality of genes comprising at least two test genes in any of Panels A-R; and either (2)(a) concluding the patient an increased risk (e.g., increased hereditary risk) of cancer based at least in part on the presence of a germline deficiency in any of said plurality of genes (or in any of said test genes); or (2)(b) concluding the patient does not have an increased risk (e.g., no increased hereditary risk) of cancer based at least in part on the absence of a germline deficiency in each of said plurality of genes (or in each of said test genes) (or alternatively concluding the patient has no identified increased risk due to the tested genes). Another such embodiment provides a method for determining whether a patient has an increased risk of cancer, which comprises: (1) determining whether the patient has a germline deficiency in any of a plurality of genes consisting of between W and X genes, said plurality of genes comprising at least two test genes in any of Panels A-R; and either (2)(a) communicating (e.g., reporting) that the patient an increased risk (e.g., increased hereditary risk) of cancer based at least in part on the presence of a germline deficiency in any of said plurality of genes (or in any of said test genes); or (2)(b) communicating (e.g., reporting) that the patient does not have an increased risk (e.g., no increased hereditary risk) of cancer based at least in part on the absence of a germline deficiency in each of said plurality of genes (or in each of said test genes) (or alternatively communicating that the patient has no identified increased risk due to the tested genes).

[0027] In each embodiment described in this document involving correlating a particular assay or analysis result or output (e.g., presence or absence of a germline deficiency in one or more genes of Panel B or Panel N) to some likelihood (e.g., increased, not increased, decreased, etc.) of some clinical feature (e.g., increased risk (e.g., increased hereditary risk) of cancer), or additionally or alternatively concluding or communicating such clinical feature based at least in part on such particular assay or analysis result, such correlating, concluding or communicating may comprise assigning a risk or likelihood of the clinical feature occurring based at least in part on the particular assay or analysis result. In some embodiments, such risk is a percentage probability of the event or outcome occurring. In some embodiments, the patient is assigned to a risk group (e.g., low risk, intermediate risk, high risk, etc.). In some embodiments “low risk” is any percentage probability below 5%, 10%, 15%, 20%, 25%, 30%, 35%, 40%, 45%, or 50%. In some embodiments “intermediate risk” is any percentage probability above 5%, 10%, 15%, 20%, 25%, 30%, 35%, 40%, 45%, or 50% and below 15%, 20%, 25%, 30%, 35%, 40%, 45%, 50%, 55%, 60%, 65%, 70%, or 75%. In some embodiments “high risk” is any percentage probability above 25%, 30%, 35%, 40%, 45%, 50%, 55%, 60%, 65%, 70%, 75%, 80%, 85%, 90%, 95%, or 99%.

[0028] As used herein, “communicating” a particular piece of information means to make such information known to another person or transfer such information to a thing (e.g., a computer). In some methods of the disclosure, a patient's qualitative or quantitative risk of cancer (e.g., a specific cancer or syndrome listed in Table 4) is communicated. In some embodiments, the information used to arrive at such a risk prediction (e.g., presence or absence of germline deficiency in one or more genes in Panel B or Panel N) is communicated. This communication may be auditory (e.g., verbal), visual (e.g., written), electronic (e.g., data transferred from one computer system to another), etc. In some embodiments, communicating a cancer risk (e.g., “increased”, “not increased”, “up to X %”, etc.) comprises generating a report that communicates the risk. In some embodiments the report is a paper report, an auditory report, or an electronic record. In some embodiments the report is displayed and/or stored on a computing device (e.g., handheld device, desktop computer, smart device, website, etc.). In some embodiments the cancer risk is communicated to a physician (e.g., a report communicating the risk is provided to the physician). In some embodiments the cancer risk is communicated to a patient (e.g., a report communicating the risk is provided to the patient). Communicating a cancer risk can also be accomplished by transferring information (e.g., data) embodying the risk to a server computer and allowing an intermediary or end-user to access such information (e.g., by viewing the information as displayed from the server, by downloading the information in the form of one or more files transferred from the server to the intermediary or end-user's device, etc.).

[0029] Wherever an embodiment of the disclosure comprises concluding some clinical feature (e.g., increased risk of cancer, etc.), this may include in some embodiments a computer program concluding such feature, typically after performing an algorithm that applies information on germline deficiency in HCGs according to the present disclosure.

### Embodiments of these Aspects

[0030] Various embodiments of the preceding aspects of the disclosure are provided. Unless otherwise stated, the disclosure may apply each of these embodiments to each of the preceding aspects.

[0031] In some embodiments, the method or system comprises comparing the sequences determined in an earlier step or other computer program with one or more reference sequences. In some embodiments, the method comprises correlating a difference between the determined sequences and the one or more reference sequences to a mutation in one or more of the genes in the plurality of genes. In some embodiments the system comprises a computer program for determining whether the patient has a mutation in one or more of the genes in the plurality of genes by determining whether there is a difference between the determined sequences and the one or more reference sequences. In some embodiments the reference sequence for any given gene in the panel is any of the sequences corresponding to that gene as shown in Table 3 below:

TABLE 3

| | | | Transcript |
|---|---|---|---|
| | | | Variant or |
| SEQ | Entrez | RefSeq Accession | Exon |
| ID | Gene | # or Sequence | Coord. in |
| NO | Symbol | Description | SEQ ID |
| 1 | APC | NM_001127511.2 | TV-1 |
| 2 | APC | NM_001127510.2 | TV-2 |
| 3 | APC | NM_000038.5 | TV-3 |
| 4 | APC | Promoter | |
| 5 | APC | Exon 1 | 501-878 |
| 6 | APC | Exon 2 | 501-585 |
| 7 | APC | Exon 3 | 501-702 |
| 8 | APC | Exon 4 | 501-609 |
| 9 | APC | Exon 5 | 501-614 |
| 10 | APC | Exon 6 | 501-605 |
| 11 | APC | Exon 7 | 501-599 |
| 12 | APC | Exon 8 | 501-879 |
| 13 | APC | Exon 9 | 501-596 |
| 14 | APC | Exon 10 | 501-640 |
| 15 | APC | Exon 11 | 501-578 |
| 16 | APC | Exon 12 | 501-617 |
| 17 | APC | Exon 13 | 501-715 |
| 18 | APC | Exon 14 | 501-9187 |
| 19 | APC | | |
| 20 | ATM | NM_000051.3 | |
| 21 | ATM | Promoter | |
| 22 | ATM | Exon 1 | 501-855 |
| 23 | ATM | Exon 2 | 501-602 |
| 24 | ATM | Exon 3 | 501-613 |
| 25 | ATM | Exon 4 | 501-646 |
| 26 | ATM | Exon 5 | 501-665 |
| 27 | ATM | Exon 6 | 501-666 |
| 28 | ATM | Exon 7 | 501-739 |
| 29 | ATM | Exon 8 | 501-664 |
| 30 | ATM | Exon 9 | 501-670 |
| 31 | ATM | Exon 10 | 501-872 |
| 32 | ATM | Exon 11 | 501-695 |
| 33 | ATM | Exon 12 | 501-596 |
| 34 | ATM | Exon 13 | 501-726 |
| 35 | ATM | Exon 14 | 501-626 |
| 36 | ATM | Exon 15 | 501-626 |
| 37 | ATM | Exon 16 | 501-590 |
| 38 | ATM | Exon 17 | 501-672 |
| 39 | ATM | Exon 18 | 501-700 |
| 40 | ATM | Exon 19 | 501-583 |
| 41 | ATM | Exon 20 | 501-656 |
| 42 | ATM | Exon 21 | 501-576 |
| 43 | ATM | Exon 22 | 501-631 |
| 44 | ATM | Exon 23 | 501-618 |
| 45 | ATM | Exon 24 | 501-674 |
| 46 | ATM | Exon 25 | 501-670 |
| 47 | ATM | Exon 26 | 501-747 |
| 48 | ATM | Exon 27 | 501-616 |
| 49 | ATM | Exon 28 | 501-627 |
| 50 | ATM | Exon 29 | 501-700 |
| 51 | ATM | Exon 30 | 501-675 |
| 52 | ATM | Exon 31 | 501-665 |
| 53 | ATM | Exon 32 | 501-633 |
| 54 | ATM | Exon 33 | 501-596 |
| 55 | ATM | Exon 34 | 501-672 |
| 56 | ATM | Exon 35 | 501-642 |
| 57 | ATM | Exon 36 | 501-677 |
| 58 | ATM | Exon 37 | 501-678 |
| 59 | ATM | Exon 38 | 501-588 |
| 60 | ATM | Exon 39 | 501-656 |
| 61 | ATM | Exon 40 | 501-588 |
| 62 | ATM | Exon 41 | 501-589 |
| 63 | ATM | Exon 42 | 501-603 |
| 64 | ATM | Exon 43 | 501-649 |
| 65 | ATM | Exon 44 | 501-605 |
| 66 | ATM | Exon 45 | 501-620 |
| 67 | ATM | Exon 46 | 501-735 |
| 68 | ATM | Exon 47 | 501-668 |
| 69 | ATM | Exon 48 | 501-614 |
| 70 | ATM | Exon 49 | 501-718 |
| 71 | ATM | Exon 50 | 501-708 |
| 72 | ATM | Exon 51 | 501-614 |
| 73 | ATM | Exon 52 | 501-659 |
| 74 | ATM | Exon 53 | 501-639 |
| 75 | ATM | Exon 54 | 501-583 |
| 76 | ATM | Exon 55 | 501-641 |
| 77 | ATM | Exon 56 | 501-617 |
| 78 | ATM | Exon 57 | 501-650 |
| 79 | ATM | Exon 58 | 501-666 |
| 80 | ATM | Exon 59 | 501-587 |
| 81 | ATM | Exon 60 | 501-615 |
| 82 | ATM | Exon 61 | 501-564 |
| 83 | ATM | Exon 62 | 501-637 |
| 84 | ATM | Exon 63 | 501-4275 |
| 85 | ATM | | |
| 86 | BARD1 | NM_000465.2 | |
| 87 | BARD1 | Promoter | |
| 88 | BARD1 | Exon 1 | 501-793 |
| 89 | BARD1 | Exon 2 | 501-557 |
| 90 | BARD1 | Exon 3 | 501-649 |
| 91 | BARD1 | Exon 4 | 501-1450 |
| 92 | BARD1 | Exon 5 | 501-581 |
| 93 | BARD1 | Exon 6 | 501-673 |
| 94 | BARD1 | Exon 7 | 501-609 |
| 95 | BARD1 | Exon 8 | 501-633 |
| 96 | BARD1 | Exon 9 | 501-593 |
| 97 | BARD1 | Exon 10 | 501-598 |
| 98 | BARD1 | Exon 11 | 501-958 |
| 99 | BARD1 | | |
| 100 | BLM | NM_000057.2 | |
| 101 | BLM | Promoter | |
| 102 | BLM | Exon 1 | 501-593 |
| 103 | BLM | Exon 2 | 501-602 |
| 104 | BLM | Exon 3 | 501-1201 |
| 105 | BLM | Exon 4 | 501-660 |
| 106 | BLM | Exon 5 | 501-628 |
| 107 | BLM | Exon 6 | 501-633 |
| 108 | BLM | Exon 7 | 501-1162 |
| 109 | BLM | Exon 8 | 501-692 |
| 110 | BLM | Exon 9 | 501-619 |
| 111 | BLM | Exon 10 | 501-614 |
| 112 | BLM | Exon 11 | 501-599 |
| 113 | BLM | Exon 12 | 501-649 |
| 114 | BLM | Exon 13 | 501-607 |
| 115 | BLM | Exon 14 | 501-661 |
| 116 | BLM | Exon 15 | 501-696 |
| 117 | BLM | Exon 16 | 501-691 |
| 118 | BLM | Exon 17 | 501-648 |
| 119 | BLM | Exon 18 | 501-700 |
| 120 | BLM | Exon 19 | 501-693 |
| 121 | BLM | Exon 20 | 501-623 |
| 122 | BLM | Exon 21 | 501-702 |
| 123 | BLM | Exon 22 | 501-855 |
| 124 | BLM | | |
| 125 | BMPR1A | NM_004329.2 | |
| 126 | BMPR1A | Promoter | |
| 127 | BMPR1A | Exon 1 | 501-781 |
| 128 | BMPR1A | Exon 2 | 501-615 |
| 129 | BMPR1A | Exon 3 | 501-719 |
| 130 | BMPR1A | Exon 4 | 501-663 |
| 131 | BMPR1A | Exon 5 | 501-603 |
| 132 | BMPR1A | Exon 6 | 501-597 |
| 133 | BMPR1A | Exon 7 | 501-600 |
| 134 | BMPR1A | Exon 8 | 501-645 |
| 135 | BMPR1A | Exon 9 | 501-693 |
| 136 | BMPR1A | Exon 10 | 501-798 |
| 137 | BMPR1A | Exon 11 | 501-676 |
| 138 | BMPR1A | Exon 12 | 501-631 |
| 139 | BMPR1A | Exon 13 | 501-2095 |
| 140 | BMPR1A | | |
| 141 | BRAF | NM_004333.4 | |
| 142 | BRAF | Promoter | |
| 143 | BRAF | Exon 1 | 501-699 |
| 144 | BRAF | Exon 2 | 501-602 |
| 145 | BRAF | Exon 3 | 501-764 |
| 146 | BRAF | Exon 4 | 501-604 |
| 147 | BRAF | Exon 5 | 501-603 |
| 148 | BRAF | Exon 6 | 501-649 |
| 149 | BRAF | Exon 7 | 501-620 |
| 150 | BRAF | Exon 8 | 501-660 |
| 151 | BRAF | Exon 9 | 501-537 |
| 152 | BRAF | Exon 10 | 501-637 |
| 153 | BRAF | Exon 11 | 501-618 |
| 154 | BRAF | Exon 12 | 501-585 |
| 155 | BRAF | Exon 13 | 501-677 |
| 156 | BRAF | Exon 14 | 501-547 |
| 157 | BRAF | Exon 15 | 501-619 |
| 158 | BRAF | Exon 16 | 501-632 |
| 159 | BRAF | Exon 17 | 501-635 |
| 160 | BRAF | Exon 18 | 501-1258 |
| 161 | BRAF | | |
| 162 | BRCA1 | NM_007294.3 | TV-1 |
| 163 | BRCA1 | NM_007300.3 | TV-2 |
| 164 | BRCA1 | NM_007297.3 | TV-3 |
| 165 | BRCA1 | NM_007298.3 | TV-4 |
| 166 | BRCA1 | NM_007299.3 | TV-5 |
| 167 | BRCA1 | Promoter | |
| 168 | BRCA1 | Exon 1 | 501-713 |
| 169 | BRCA1 | Exon 2 | 501-599 |
| 170 | BRCA1 | Exon 3 | 501-554 |
| 171 | BRCA1 | Exon 4 | 501-578 |
| 172 | BRCA1 | Exon 5 | 501-589 |
| 173 | BRCA1 | Exon 6 | 501-640 |
| 174 | BRCA1 | Exon 7 | 501-606 |
| 175 | BRCA1 | Exon 8 | 501-546 |
| 176 | BRCA1 | Exon 9 | 501-577 |
| 177 | BRCA1 | Exon 10 | 501-3926 |
| 178 | BRCA1 | Exon 11 | 501-589 |
| 179 | BRCA1 | Exon 12 | 501-672 |
| 180 | BRCA1 | Exon 13 | 501-566 |
| 181 | BRCA1 | Exon 14 | 501-624 |
| 182 | BRCA1 | Exon 15 | 501-691 |
| 183 | BRCA1 | Exon 16 | 501-811 |
| 184 | BRCA1 | Exon 17 | 501-588 |
| 185 | BRCA1 | Exon 18 | 501-578 |
| 186 | BRCA1 | Exon 19 | 501-541 |
| 187 | BRCA1 | Exon 20 | 501-584 |
| 188 | BRCA1 | Exon 21 | 501-555 |
| 189 | BRCA1 | Exon 22 | 501-574 |
| 190 | BRCA1 | Exon 23 | 501-561 |
| 191 | BRCA1 | Exon 24 | 501-2008 |
| 192 | BRCA1 | | |
| 193 | BRCA2 | NM_000059.3 | |
| 194 | BRCA2 | Promoter | |
| 195 | BRCA2 | Exon 1 | 501-688 |
| 196 | BRCA2 | Exon 2 | 501-606 |
| 197 | BRCA2 | Exon 3 | 501-749 |
| 198 | BRCA2 | Exon 4 | 501-609 |
| 199 | BRCA2 | Exon 5 | 501-550 |
| 200 | BRCA2 | Exon 6 | 501-541 |
| 201 | BRCA2 | Exon 7 | 501-615 |
| 202 | BRCA2 | Exon 8 | 501-550 |
| 203 | BRCA2 | Exon 9 | 501-612 |
| 204 | BRCA2 | Exon 10 | 501-1616 |
| 205 | BRCA2 | Exon 11 | 501-5432 |
| 206 | BRCA2 | Exon 12 | 501-596 |
| 207 | BRCA2 | Exon 13 | 501-570 |
| 208 | BRCA2 | Exon 14 | 501-928 |
| 209 | BRCA2 | Exon 15 | 501-682 |
| 210 | BRCA2 | Exon 16 | 501-688 |
| 211 | BRCA2 | Exon 17 | 501-671 |
| 212 | BRCA2 | Exon 18 | 501-855 |
| 213 | BRCA2 | Exon 19 | 501-656 |
| 214 | BRCA2 | Exon 20 | 501-645 |
| 215 | BRCA2 | Exon 21 | 501-622 |
| 216 | BRCA2 | Exon 22 | 501-699 |
| 217 | BRCA2 | Exon 23 | 501-664 |
| 218 | BRCA2 | Exon 24 | 501-639 |
| 219 | BRCA2 | Exon 25 | 501-745 |
| 220 | BRCA2 | Exon 26 | 501-647 |
| 221 | BRCA2 | Exon 27 | 501-2011 |
| 222 | BRCA2 | | |
| 223 | BRIP1 | NM_032043.2 | |
| 224 | BRIP1 | NM_032043.2 | |
| 225 | BRIP1 | Promoter | |
| 226 | BRIP1 | Exon 1 | 501-776 |
| 227 | BRIP1 | Exon 2 | 501-623 |
| 228 | BRIP1 | Exon 3 | 501-612 |
| 229 | BRIP1 | Exon 4 | 501-674 |
| 230 | BRIP1 | Exon 5 | 501-628 |
| 231 | BRIP1 | Exon 6 | 501-620 |
| 232 | BRIP1 | Exon 7 | 501-791 |
| 233 | BRIP1 | Exon 8 | 501-722 |
| 234 | BRIP1 | Exon 9 | 501-700 |
| 235 | BRIP1 | Exon 10 | 501-633 |
| 236 | BRIP1 | Exon 11 | 501-655 |
| 237 | BRIP1 | Exon 12 | 501-666 |
| 238 | BRIP1 | Exon 13 | 501-641 |
| 239 | BRIP1 | Exon 14 | 501-662 |
| 240 | BRIP1 | Exon 15 | 501-660 |
| 241 | BRIP1 | Exon 16 | 501-622 |
| 242 | BRIP1 | Exon 17 | 501-613 |
| 243 | BRIP1 | Exon 18 | 501-583 |
| 244 | BRIP1 | Exon 19 | 501-830 |
| 245 | BRIP1 | Exon 20 | 501-5455 |
| 246 | BRIP1 | | |
| 247 | CDH1 | NM_004360.3 | |
| 248 | CDH1 | Promoter | |
| 249 | CDH1 | Exon 1 | 501-672 |
| 250 | CDH1 | Exon 2 | 501-615 |
| 251 | CDH1 | Exon 3 | 501-724 |
| 252 | CDH1 | Exon 4 | 501-644 |
| 253 | CDH1 | Exon 5 | 501-656 |
| 254 | CDH1 | Exon 6 | 501-645 |
| 255 | CDH1 | Exon 7 | 501-676 |
| 256 | CDH1 | Exon 8 | 501-629 |
| 257 | CDH1 | Exon 9 | 501-683 |
| 258 | CDH1 | Exon 10 | 501-745 |
| 259 | CDH1 | Exon 11 | 501-646 |
| 260 | CDH1 | Exon 12 | 501-725 |
| 261 | CDH1 | Exon 13 | 501-728 |
| 262 | CDH1 | Exon 14 | 501-631 |
| 263 | CDH1 | Exon 15 | 501-644 |
| 264 | CDH1 | Exon 16 | 501-2752 |
| 265 | CDH1 | | |
| 266 | CDK4 | NM_000075.3 | |
| 267 | CDK4 | Promoter | |
| 268 | CDK4 | Exon 1 | 501-773 |
| 269 | CDK4 | Exon 2 | 501-737 |
| 270 | CDK4 | Exon 3 | 501-636 |
| 271 | CDK4 | Exon 4 | 501-668 |
| 272 | CDK4 | Exon 5 | 501-610 |
| 273 | CDK4 | Exon 6 | 501-551 |
| 274 | CDK4 | Exon 7 | 501-636 |
| 275 | CDK4 | Exon 8 | 501-1391 |
| 276 | CDK4 | | |
| 277 | CDKN2A | NM_000077.4 | TV-1 |
| 278 | CDKN2A | NM_058197.4 | TV-3 |
| 279 | CDKN2A | NM_058195.3 | TV-4 |
| 280 | CDKN2A | NM_001195132.1 | TV-5 |
| 281 | CDKN2A | Promoter | |
| 282 | CDKN2A | Exon 1 | 501-956 |
| 283 | CDKN2A | Exon 2 | 501-807 |
| 284 | CDKN2A | Exon 3 | 501-697 |
| 285 | CDKN2A | Exon 4 | 501-991 |
| 286 | CDKN2A | | |
| 287 | CEBPA | NM_004364.3 | |
| 288 | CHEK2 | NM_007194.3 | TV-1 |
| 289 | CHEK2 | NM_145862.2 | TV-2 |
| 290 | CHEK2 | NM_001005735.1 | TV-3 |
| 291 | CHEK2 | Promoter | |
| 292 | CHEK2 | Exon 1 | 501-566 |
| 293 | CHEK2 | Exon 2 | 501-825 |
| 294 | CHEK2 | Exon 3 | 501-629 |
| 295 | CHEK2 | Exon 4 | 501-625 |
| 296 | CHEK2 | Exon 5 | 501-648 |
| 297 | CHEK2 | Exon 6 | 501-591 |
| 298 | CHEK2 | Exon 7 | 501-609 |
| 299 | CHEK2 | Exon 8 | 501-554 |
| 300 | CHEK2 | Exon 9 | 501-562 |
| 301 | CHEK2 | Exon 10 | 501-600 |
| 302 | CHEK2 | Exon 11 | 501-587 |
| 303 | CHEK2 | Exon 12 | 501-664 |
| 304 | CHEK2 | Exon 13 | 501-616 |
| 305 | CHEK2 | Exon 14 | 501-586 |
| 306 | CHEK2 | Exon 15 | 501-581 |
| 307 | CHEK2 | Exon 16 | 501-744 |
| 308 | CHEK2 | | |
| 309 | ELAC2 | NM_018127.6 | TV-1 |
| 310 | ELAC2 | NM_173717.1 | TV-2 |
| 311 | ELAC2 | NM_001165962.1 | TV-3 |
| 312 | ELAC2 | Promoter | |
| 313 | ELAC2 | Exon 1 | 501-862 |
| 314 | ELAC2 | Exon 2 | 501-551 |
| 315 | ELAC2 | Exon 3 | 501-571 |
| 316 | ELAC2 | Exon 4 | 501-565 |
| 317 | ELAC2 | Exon 5 | 501-558 |
| 318 | ELAC2 | Exon 6 | 501-569 |
| 319 | ELAC2 | Exon 7 | 501-620 |
| 320 | ELAC2 | Exon 8 | 501-559 |
| 321 | ELAC2 | Exon 9 | 501-559 |
| 322 | ELAC2 | Exon 10 | 501-573 |
| 323 | ELAC2 | Exon 11 | 501-613 |
| 324 | ELAC2 | Exon 12 | 501-596 |
| 325 | ELAC2 | Exon 13 | 501-639 |
| 326 | ELAC2 | Exon 14 | 501-586 |
| 327 | ELAC2 | Exon 15 | 501-619 |
| 328 | ELAC2 | Exon 16 | 501-597 |
| 329 | ELAC2 | Exon 17 | 501-639 |
| 330 | ELAC2 | Exon 18 | 501-539 |
| 331 | ELAC2 | Exon 19 | 501-610 |
| 332 | ELAC2 | Exon 20 | 501-600 |
| 333 | ELAC2 | Exon 21 | 501-621 |
| 334 | ELAC2 | Exon 22 | 501-579 |
| 335 | ELAC2 | Exon 23 | 501-645 |
| 336 | ELAC2 | Exon 24 | 501-1934 |
| 337 | ELAC2 | | |
| 338 | EPCAM | NM_002354.2 | |
| 339 | EPCAM | Promoter | |
| 340 | EPCAM | Exon 1 | 501-934 |
| 341 | EPCAM | Exon 2 | 501-608 |
| 342 | EPCAM | Exon 3 | 501-741 |
| 343 | EPCAM | Exon 4 | 501-566 |
| 344 | EPCAM | Exon 5 | 501-564 |
| 345 | EPCAM | Exon 6 | 501-602 |
| 346 | EPCAM | Exon 7 | 501-701 |
| 347 | EPCAM | Exon 8 | 501-545 |
| 348 | EPCAM | Exon 9 | 501-957 |
| 349 | EPCAM | | |
| 350 | FANCA | NM_000135.2 | TV-1 |
| 351 | FANCA | NM_001018112.1 | TV-2 |
| 352 | FANCB | NM_001018113.1 | TV-1 |
| 353 | FANCB | NM_152633.2 | TV-2 |
| 354 | FANCC | NM_000136.2 | TV-1 |
| 355 | FANCC | NM_001243743.1 | TV-2 |
| 356 | FANCC | NM_001243744.1 | TV-3 |
| 357 | FANCD2 | NM_033084.3 | TV-1 |
| 358 | FANCD2 | NM_001018115.1 | TV-2 |
| 359 | FANCE | NM_021922.2 | |
| 360 | FANCF | NM_022725.3 | |
| 361 | FANCG | NM_004629.1 | |
| 362 | FANCI | NM_001113378.1 | TV-1 |
| 363 | FANCI | NM_018193.2 | TV-2 |
| 364 | FANCL | NM_001114636.1 | TV-1 |
| 365 | FANCL | NM_018062.3 | TV-2 |
| 366 | FANCM | NM_020937.2 | |
| 367 | FLCN | NM_144997.5 | TV-1 |
| 368 | FLCN | NM_144606.5 | TV-2 |
| 369 | HOXB13 | NM_006361.5 | |
| 370 | HOXB13 | Promoter | |
| 371 | HOXB13 | Exon 1 | 501-1257 |
| 372 | HOXB13 | Exon 2 | 501-2779 |
| 373 | HOXB13 | | |
| 374 | KRAS | NM_033360.2 | TV-a |
| 375 | KRAS | NM_004985.3 | TV-b |
| 376 | MEN1 | NM_000244.3 | TV-1 |
| 377 | MEN1 | NM_130799.2 | TV-2 |
| 378 | MEN1 | NM_130800.2 | TV-e1B |
| 379 | MEN1 | NM_130801.2 | TV-e1C |
| 380 | MEN1 | NM_130802.2 | TV-e1D |
| 381 | MEN1 | NM_130803.2 | TV-e1E |
| 382 | MEN1 | NM_130804.2 | TV-e1F1 |
| 383 | MITF | NM_198159.2 | TV-1 |
| 384 | MITF | NM_198177.2 | TV-2 |
| 385 | MITF | NM_006722.2 | TV-3 |
| 386 | MITF | NM_000248.3 | TV-4 |
| 387 | MITF | NM_198158.2 | TV-5 |
| 388 | MITF | NM_198178.2 | TV-6 |
| 389 | MITF | NM_001184967.1 | TV-7 |
| 390 | MITF | NM_001184968.1 | TV-8 |
| 391 | MITF | Promoter | |
| 392 | MITF | Exon 1 | 501-767 |
| 393 | MITF | Exon 2 | 501-750 |
| 394 | MITF | Exon 3 | 501-728 |
| 395 | MITF | Exon 4 | 501-584 |
| 396 | MITF | Exon 5 | 501-596 |
| 397 | MITF | Exon 6 | 501-618 |
| 398 | MITF | Exon 7 | 501-557 |
| 399 | MITF | Exon 8 | 501-576 |
| 400 | MITF | Exon 9 | 501-648 |
| 401 | MITF | Exon 10 | 501-3991 |
| 402 | MITF | | |
| 403 | MLH1 | NM_000249.3 | TV-1 |
| 404 | MLH1 | NM_001167617.1 | TV-2 |
| 405 | MLH1 | NM_001167618.1 | TV-3 |
| 406 | MLH1 | NM_001167619.1 | TV-4 |
| 407 | MLH1 | Promoter | |
| 408 | MLH1 | Exon 1 | 501-814 |
| 409 | MLH1 | Exon 2 | 501-591 |
| 410 | MLH1 | Exon 3 | 501-599 |
| 411 | MLH1 | Exon 4 | 501-574 |
| 412 | MLH1 | Exon 5 | 501-573 |
| 413 | MLH1 | Exon 6 | 501-592 |
| 414 | MLH1 | Exon 7 | 501-543 |
| 415 | MLH1 | Exon 8 | 501-589 |
| 416 | MLH1 | Exon 9 | 501-613 |
| 417 | MLH1 | Exon 10 | 501-594 |
| 418 | MLH1 | Exon 11 | 501-654 |
| 419 | MLH1 | Exon 12 | 501-871 |
| 420 | MLH1 | Exon 13 | 501-649 |
| 421 | MLH1 | Exon 14 | 501-609 |
| 422 | MLH1 | Exon 15 | 501-564 |
| 423 | MLH1 | Exon 16 | 501-665 |
| 424 | MLH1 | Exon 17 | 501-593 |
| 425 | MLH1 | Exon 18 | 501-614 |
| 426 | MLH1 | Exon 19 | 501-861 |
| 427 | MLH1 | | |
| 428 | MLH3 | NM_001040108.1 | TV-1 |
| 429 | MLH3 | NM_014381.2 | TV-2 |
| 430 | MLH3 | Promoter | |
| 431 | MLH3 | Exon 1 | 501-653 |
| 432 | MLH3 | Exon 2 | 501-3843 |
| 433 | MLH3 | Exon 3 | 501-599 |
| 434 | MLH3 | Exon 4 | 501-586 |
| 435 | MLH3 | Exon 5 | 501-605 |
| 436 | MLH3 | Exon 6 | 501-573 |
| 437 | MLH3 | Exon 7 | 501-572 |
| 438 | MLH3 | Exon 8 | 501-612 |
| 439 | MLH3 | Exon 9 | 501-660 |
| 440 | MLH3 | Exon 10 | 501-524 |
| 441 | MLH3 | Exon 11 | 501-579 |
| 442 | MLH3 | Exon 12 | 501-652 |
| 443 | MLH3 | Exon 13 | 501-3938 |
| 444 | MLH3 | | |
| 445 | MRE11A | NM_005591.3 | TV-1 |
| 446 | MRE11A | NM_005590.3 | TV-2 |
| 447 | MRE11A | Promoter | |
| 448 | MRE11A | Exon 1 | 501-584 |
| 449 | MRE11A | Exon 2 | 501-625 |
| 450 | MRE11A | Exon 3 | 501-633 |
| 451 | MRE11A | Exon 4 | 501-661 |
| 452 | MRE11A | Exon 5 | 501-588 |
| 453 | MRE11A | Exon 6 | 501-642 |
| 454 | MRE11A | Exon 7 | 501-615 |
| 455 | MRE11A | Exon 8 | 501-686 |
| 456 | MRE11A | Exon 9 | 501-672 |
| 457 | MRE11A | Exon 10 | 501-581 |
| 458 | MRE11A | Exon 11 | 501-627 |
| 459 | MRE11A | Exon 12 | 501-601 |
| 460 | MRE11A | Exon 13 | 501-674 |
| 461 | MRE11A | Exon 14 | 501-563 |
| 462 | MRE11A | Exon 15 | 501-720 |
| 463 | MRE11A | Exon 16 | 501-584 |
| 464 | MRE11A | Exon 17 | 501-559 |
| 465 | MRE11A | Exon 18 | 501-568 |
| 466 | MRE11A | Exon 19 | 501-576 |
| 467 | MRE11A | Exon 20 | 501-3379 |
| 468 | MRE11A | | |
| 469 | MSH2 | NM_000251.1 | |
| 470 | MSH2 | Promoter | |
| 471 | MSH2 | Exon 1 | 501-779 |
| 472 | MSH2 | Exon 2 | 501-655 |
| 473 | MSH2 | Exon 3 | 501-779 |
| 474 | MSH2 | Exon 4 | 501-647 |
| 475 | MSH2 | Exon 5 | 501-650 |
| 476 | MSH2 | Exon 6 | 501-634 |
| 477 | MSH2 | Exon 7 | 501-700 |
| 478 | MSH2 | Exon 8 | 501-610 |
| 479 | MSH2 | Exon 9 | 501-624 |
| 480 | MSH2 | Exon 10 | 501-651 |
| 481 | MSH2 | Exon 11 | 501-598 |
| 482 | MSH2 | Exon 12 | 501-746 |
| 483 | MSH2 | Exon 13 | 501-705 |
| 484 | MSH2 | Exon 14 | 501-748 |
| 485 | MSH2 | Exon 15 | 501-676 |
| 486 | MSH2 | Exon 16 | 501-943 |
| 487 | MSH2 | | |
| 488 | MSH6 | NM_000179.2 | |
| 489 | MSH6 | Promoter | |
| 490 | MSH6 | Exon 1 | 501-912 |
| 491 | MSH6 | Exon 2 | 501-697 |
| 492 | MSH6 | Exon 3 | 501-670 |
| 493 | MSH6 | Exon 4 | 501-3045 |
| 494 | MSH6 | Exon 5 | 501-766 |
| 495 | MSH6 | Exon 6 | 501-618 |
| 496 | MSH6 | Exon 7 | 501-590 |
| 497 | MSH6 | Exon 8 | 501-654 |
| 498 | MSH6 | Exon 9 | 501-700 |
| 499 | MSH6 | Exon 10 | 501-675 |
| 500 | MSH6 | | |
| 501 | MUTYH | NM_012222.2 | TV-alpha1 |
| 502 | MUTYH | NM_001048171.1 | TV-alpha3 |
| 503 | MUTYH | NM_001128425.1 | TV-alpha5 |
| 504 | MUTYH | NM_001048174.1 | TV-beta3 |
| 505 | MUTYH | NM_001048172.1 | TV- |
| | | | gamma2 |
| 506 | MUTYH | NM_001048173.1 | TV- |
| | | | gamma3 |
| 507 | MUTYH | Promoter | |
| 508 | MUTYH | Exon 1 | 501-752 |
| 509 | MUTYH | Exon 2 | 501-621 |
| 510 | MUTYH | Exon 3 | 501-691 |
| 511 | MUTYH | Exon 4 | 501-540 |
| 512 | MUTYH | Exon 5 | 501-574 |
| 513 | MUTYH | Exon 6 | 501-542 |
| 514 | MUTYH | Exon 7 | 501-572 |
| 515 | MUTYH | Exon 8 | 501-614 |
| 516 | MUTYH | Exon 9 | 501-598 |
| 517 | MUTYH | Exon 10 | 501-645 |
| 518 | MUTYH | Exon 11 | 501-564 |
| 519 | MUTYH | Exon 12 | 501-689 |
| 520 | MUTYH | Exon 13 | 501-637 |
| 521 | MUTYH | Exon 14 | 501-653 |
| 522 | MUTYH | Exon 15 | 501-542 |
| 523 | MUTYH | Exon 16 | 501-696 |
| 524 | MUTYH | | |
| 525 | NBN | NM_002485.4 | |
| 526 | NBN | Promoter | |
| 527 | NBN | Exon 1 | 501-647 |
| 528 | NBN | Exon 2 | 501-634 |
| 529 | NBN | Exon 3 | 501-649 |
| 530 | NBN | Exon 4 | 501-660 |
| 531 | NBN | Exon 5 | 501-604 |
| 532 | NBN | Exon 6 | 501-618 |
| 533 | NBN | Exon 7 | 501-694 |
| 534 | NBN | Exon 8 | 501-598 |
| 535 | NBN | Exon 9 | 501-630 |
| 536 | NBN | Exon 10 | 501-773 |
| 537 | NBN | Exon 11 | 501-948 |
| 538 | NBN | Exon 12 | 501-569 |
| 539 | NBN | Exon 13 | 501-656 |
| 540 | NBN | Exon 14 | 501-614 |
| 541 | NBN | Exon 15 | 501-550 |
| 542 | NBN | Exon 16 | 501-2777 |
| 543 | NBN | | |
| 544 | PALB2 | NM_024675.3 | |
| 545 | PALB2 | Promoter | |
| 546 | PALB2 | Exon 1 | 501-748 |
| 547 | PALB2 | Exon 2 | 501-560 |
| 548 | PALB2 | Exon 3 | 501-603 |
| 549 | PALB2 | Exon 4 | 501-1973 |
| 550 | PALB2 | Exon 5 | 501-1330 |
| 551 | PALB2 | Exon 6 | 501-572 |
| 552 | PALB2 | Exon 7 | 501-662 |
| 553 | PALB2 | Exon 8 | 501-586 |
| 554 | PALB2 | Exon 9 | 501-662 |
| 555 | PALB2 | Exon 10 | 501-617 |
| 556 | PALB2 | Exon 11 | 501-588 |
| 557 | PALB2 | Exon 12 | 501-649 |
| 558 | PALB2 | Exon 13 | 501-1008 |
| 559 | PALB2 | | |
| 560 | PIK3CA | NM_006218.2 | |
| 561 | PMS1 | NM_000534.4 | TV-1 |
| 562 | PMS1 | NM_001128143.1 | TV-2 |
| 563 | PMS1 | NM_001128144.1 | TV-3 |
| 564 | PMS2 | NM_000535.5 | |
| 565 | PMS2 | Promoter | |
| 566 | PMS2 | Exon 1 | 501-610 |
| 567 | PMS2 | Exon 2 | 501-640 |
| 568 | PMS2 | Exon 3 | 501-587 |
| 569 | PMS2 | Exon 4 | 501-603 |
| 570 | PMS2 | Exon 5 | 501-684 |
| 571 | PMS2 | Exon 6 | 501-668 |
| 572 | PMS2 | Exon 7 | 501-598 |
| 573 | PMS2 | Exon 8 | 501-600 |
| 574 | PMS2 | Exon 9 | 501-585 |
| 575 | PMS2 | Exon 10 | 501-656 |
| 576 | PMS2 | Exon 11 | 501-1362 |
| 577 | PMS2 | Exon 12 | 501-668 |
| 578 | PMS2 | Exon 13 | 501-601 |
| 579 | PMS2 | Exon 14 | 501-670 |
| 580 | PMS2 | Exon 15 | 501-804 |
| 581 | PMS2 | | |
| 582 | PTCH1 | NM_001083602.1 | TV-1a |
| 583 | PTCH1 | NM_001083603.1 | TV-1a′ |
| 584 | PTCH1 | NM_000264.3 | TV-1b |
| 585 | PTCH1 | NM_001083604.1 | TV-1c |
| 586 | PTCH1 | NM_001083605.1 | TV-1c′ |
| 587 | PTCH1 | NM_001083606.1 | TV-1d |
| 588 | PTCH1 | NM_001083607.1 | TV-1e |
| 589 | PTEN | NM_000314.4 | |
| 590 | PTEN | Promoter | |
| 591 | PTEN | Exon 1 | 501-1611 |
| 592 | PTEN | Exon 2 | 501-585 |
| 593 | PTEN | Exon 3 | 501-545 |
| 594 | PTEN | Exon 4 | 501-544 |
| 595 | PTEN | Exon 5 | 501-739 |
| 596 | PTEN | Exon 6 | 501-642 |
| 597 | PTEN | Exon 7 | 501-667 |
| 598 | PTEN | Exon 8 | 501-725 |
| 599 | PTEN | Exon 9 | 501-3989 |
| 600 | PTEN | | |
| 601 | RAD50 | NM_005732.3 | |
| 602 | RAD50 | Promoter | |
| 603 | RAD50 | Exon 1 | 501-1030 |
| 604 | RAD50 | Exon 2 | 501-584 |
| 605 | RAD50 | Exon 3 | 501-651 |
| 606 | RAD50 | Exon 4 | 501-686 |
| 607 | RAD50 | Exon 5 | 501-705 |
| 608 | RAD50 | Exon 6 | 501-629 |
| 609 | RAD50 | Exon 7 | 501-666 |
| 610 | RAD50 | Exon 8 | 501-694 |
| 611 | RAD50 | Exon 9 | 501-707 |
| 612 | RAD50 | Exon 10 | 501-683 |
| 613 | RAD50 | Exon 11 | 501-685 |
| 614 | RAD50 | Exon 12 | 501-676 |
| 615 | RAD50 | Exon 13 | 501-738 |
| 616 | RAD50 | Exon 14 | 501-690 |
| 617 | RAD50 | Exon 15 | 501-627 |
| 618 | RAD50 | Exon 16 | 501-694 |
| 619 | RAD50 | Exon 17 | 501-611 |
| 620 | RAD50 | Exon 18 | 501-593 |
| 621 | RAD50 | Exon 19 | 501-614 |
| 622 | RAD50 | Exon 20 | 501-628 |
| 623 | RAD50 | Exon 21 | 501-725 |
| 624 | RAD50 | Exon 22 | 501-586 |
| 625 | RAD50 | Exon 23 | 501-643 |
| 626 | RAD50 | Exon 24 | 501-634 |
| 627 | RAD50 | Exon 25 | 501-2944 |
| 628 | RAD50 | | |
| 629 | RAD51C | NM_058216.1 | TV-1 |
| 630 | RAD51C | NM_002876.2 | TV-2 |
| 631 | RAD51C | Promoter | |
| 632 | RAD51C | Exon 1 | 501-687 |
| 633 | RAD51C | Exon 2 | 501-904 |
| 634 | RAD51C | | |
| 635 | RAD51D | NM_002878.3 | TV-1 |
| 636 | RAD51D | NM_133629.2 | TV-4 |
| 637 | RAD51D | NM_001142571.1 | TV-6 |
| 638 | RAD5ID | Promoter | |
| 639 | RAD51D | Exon 1 | 501-838 |
| 640 | RAD51D | Exon 2 | 501-562 |
| 641 | RAD51D | Exon 3 | 501-679 |
| 642 | RAD51D | Exon 4 | 501-619 |
| 643 | RAD51D | Exon 5 | 501-582 |
| 644 | RAD51D | Exon 6 | 501-635 |
| 645 | RAD51D | Exon 7 | 501-596 |
| 646 | RAD51D | Exon 8 | 501-591 |
| 647 | RAD51D | Exon 9 | 501-571 |
| 648 | RAD51D | Exon 10 | 501-665 |
| 649 | RAD51D | Exon 11 | 501-1745 |
| 650 | RAD51D | | |
| 651 | RET | NM_020975.4 | TV-2 |
| 652 | RET | NM_020630.4 | TV-4 |
| 653 | SDHAF2 | NM_017841.2 | |
| 654 | SDHB | NM_003000.2 | |
| 655 | SDHC | NM_003001.3 | TV-1 |
| 656 | SDHC | NM_001035511.1 | TV-2 |
| 657 | SDHC | NM_001035512.1 | TV-3 |
| 658 | SDHC | NM_001035513.1 | TV-4 |
| 659 | SDHD | NM_003002.2 | |
| 660 | SMAD4 | NM_005359.5 | |
| 661 | SMAD4 | Promoter | |
| 662 | SMAD4 | Exon 1 | 501-911 |
| 663 | SMAD4 | Exon 2 | 501-876 |
| 664 | SMAD4 | Exon 3 | 501-675 |
| 665 | SMAD4 | Exon 4 | 501-530 |
| 666 | SMAD4 | Exon 5 | 501-713 |
| 667 | SMAD4 | Exon 6 | 501-620 |
| 668 | SMAD4 | Exon 7 | 501-617 |
| 669 | SMAD4 | Exon 8 | 501-551 |
| 670 | SMAD4 | Exon 9 | 501-684 |
| 671 | SMAD4 | Exon 10 | 501-669 |
| 672 | SMAD4 | Exon 11 | 501-639 |
| 673 | SMAD4 | Exon 12 | 501-7286 |
| 674 | SMAD4 | | |
| 675 | STK11 | NM_000455.4 | |
| 676 | STK11 | Promoter | |
| 677 | STK11 | Exon 1 | 501-1905 |
| 678 | STK11 | Exon 2 | 501-584 |
| 679 | STK11 | Exon 3 | 501-590 |
| 680 | STK11 | Exon 4 | 501-633 |
| 681 | STK11 | Exon 5 | 501-637 |
| 682 | STK11 | Exon 6 | 501-628 |
| 683 | STK11 | Exon 7 | 501-558 |
| 684 | STK11 | Exon 8 | 501-688 |
| 685 | STK11 | Exon 9 | 501-710 |
| 686 | STK11 | Exon 10 | 501-1343 |
| 687 | STK11 | | |
| 688 | TMEM127 | NM_017849.3 | TV-1 |
| 689 | TMEM127 | NM_001193304.2 | TV-2 |
| 690 | TP53 | NM_000546.4 | TV-1 |
| 691 | TP53 | NM_001126112.2 | TV-2 |
| 692 | TP53 | NM_001126114.1 | TV-3 |
| 693 | TP53 | NM_001126113.1 | TV-4 |
| 694 | TP53 | NM_001126115.1 | TV-5 |
| 695 | TP53 | NM_001126116.1 | TV-6 |
| 696 | TP53 | NM_001126117.1 | TV-7 |
| 697 | TP53 | Promoter | |
| 698 | TP53 | | |
| 699 | TP53 | Exon 1 | 501-674 |
| 700 | TP53 | Exon 2 | 501-602 |
| 701 | TP53 | Exon 3 | 501-741 |
| 702 | TP53 | Exon 4 | 501-522 |
| 703 | TP53 | Exon 5 | 501-779 |
| 704 | TP53 | Exon 6 | 501-684 |
| 705 | TP53 | Exon 7 | 501-613 |
| 706 | TP53 | Exon 8 | 501-941 |
| 707 | TP53 | Exon 9 | 501-610 |
| 708 | TP53 | Exon 10 | 501-637 |
| 709 | TP53 | Exon 11 | 501-574 |
| 710 | TP53 | Exon 12 | 501-607 |
| 711 | TP53 | Exon 13 | 501-560 |
| 712 | TP53 | Exon 14 | 501-633 |
| 713 | TP53 | Exon 15 | 501-1789 |
| 714 | TP53 | | |
| 715 | VHL | NM_000551.3 | TV-1 |
| 716 | VHL | NM_198156.2 | TV-2 |

[0032] Table 3 shows how sequence identifiers (i.e., SEQ ID NOs) correspond to different reference sequences useful for the various HCGs in various aspects of the disclosure. As used in Table 3, “transcript variant” (abbreviated “TV” in Table 3) refers to differently spliced transcripts expressed from some genes and the names (e.g., numbers) given these variants in NCBI. In cases where no transcript variant is indicated, this is because NCBI lists only one transcript for the relevant gene. The exon coordinates given in Table 3 indicate where in each relevant sequence the exons are found. The first 500 and last 500 nucleotides of each such sequence are intronic. As used herein, “exon/intron boundary” in one of these sequences means a certain number of nucleotides (e.g., 1, 2, 3, 4, 5, 10, 15, 20, 30, 40, 50, 75, 100 or more) on each side of the transition (e.g., phosphodiester bond) from exon to intron (or from intron to exon) or a portion of the nucleotide sequence of at least a certain length (e.g., 1, 2, 3, 4, 5, 10, 15, 20, 30, 40, 50, 75, 100 or more) comprising the two nucleotides on each side of the transition from exon to intron (or from intron to exon).

[0033] In some embodiments of various aspects of the disclosure, a nucleic acid of the disclosure (e.g., in a primer set, in an array, in a kit, etc.) comprises at least 5, 6, 7, 8, 9, 10, 11, 12, 13, 14, 15, 16, 17, 18, 19, 20, 25, 30, 35, 40, 45, 50, 60, 70, 80, 90, or 100 or more nucleotides on each side of such transition. Thus, an oligonucleotide (e.g., primer) according to the disclosure targeting Exon 3 of the APC gene “comprising 10 nucleotides on each side of the 5′ exon/intron boundary of Exon 3 of the APC gene” would comprise nucleotides 491-510 of SEQ ID NO:7, or the following sequence: 5′-ttttatttagAGCTTAACTT-3′ (with lower case letters indicating intronic sequence and capitalized letters indicating exonic sequence). In some embodiments of various aspects of the disclosure, a nucleic acid of the disclosure comprises at least 5, 6, 7, 8, 9, 10, 11, 12, 13, 14, 15, 16, 17, 18, 19, 20, 25, 30, 35, 40, 45, 50, 60, 70, 80, 90, or 100 or more consecutive nucleotides of a nucleotide sequence in a SEQ ID NO including the two nucleotides on each side of such transition. Thus, an oligonucleotide (e.g., primer) according to the disclosure targeting Exon 3 of the APC gene “comprising 18 consecutive nucleotides of SEQ ID NO:7 including the 5′ exon/intron boundary of Exon 3 of the APC gene” would comprise any 18 consecutive nucleotides between (and including) positions 484 and 517 of SEQ ID NO:7, or any 18 consecutive nucleotides of the following sequence: 5′-gtttctattttatttagAGCTTAACTTAGATAGC-3′ (with lower case letters indicating intronic sequence and capitalized letters indicating exonic sequence). At various places in this document Exon 3 of the APC gene is used as an example to illustrate various embodiments of the disclosure. Those skilled in the art, based on the knowledge in the art and the present disclosure (especially Table 3), can readily and unambiguously apply each example to any gene, exon, or sequence disclosed herein.

[0034] Germline deficiencies in the genes in Panels A-R correlate to increased risk of cancer, including particular cancers as summarized in Table 4. Thus, in some embodiments the method of the disclosure comprises correlating a germline deficiency in any particular gene in the plurality of genes to an increased risk of a particular cancer as shown in Table 4. In some embodiments the method comprises diagnosing the patient with an increased risk of a particular cancer (or a particular syndrome) as shown in Table 4 based at least in part on a germline deficiency in any particular gene in the plurality of genes. In some embodiments the method comprises correlating no germline deficiency in any gene in the plurality of genes to no increased risk of any cancer (or to no identified increased risk due to the tested genes). In some embodiments the system of the disclosure comprises a computer program for determining (including quantifying) the patient's degree of risk of cancer (e.g., any particular cancer as shown in Table 4) based at least in part on the comparison of the test sequence with said one or more reference sequences.

TABLE 4

| | Associated Cancer (e.g., | |
|---|---|---|
| Gene | indicator of syndrome or | |
| Symbol | hereditary cancer risk) | Syndrome (if any) |
| APC | Colon | FAP |
| ATM | Breast | Ataxia Telangiectasia |
| BARD1 | Breast | |
| BMPR1A | GI | Juvenile Polyposis Syndrome |
| BRCA1 | Breast, Ovarian | Hereditary Breast and Ovarian Cancer |
| | | Syndrome (HBOC) |
| BRCA2 | Breast, Ovarian | HBOC |
| BRIP1 | Breast, | |
| CDH1 | Breast, Gastric | Hereditary Diffuse Gastric Cancer |
| CDK4 | Melanoma | Hereditary Melonoma (aka Multiple Nevi |
| | | Syndrome) |
| CDKN2A | Melanoma, Pancreatic | Hereditary Melonoma (aka Multiple Nevi |
| | | Syndrome) |
| CHEK2 | Breast, Colon | |
| HOXB13 | Prostate | |
| MLH1 | Colon, Endometrial, Ovarian | Lynch Syndrome (aka Hereditary Non- |
| | | Polyposis Colorectal Cancer or HNPCC) |
| MLH3 | Colon, Endometrial, Ovarian | Lynch Syndrome |
| MRE11 | | |
| MSH2 | Colon, Endometrial, Ovarian | Lynch Syndrome |
| MSH6 | Colon, Endometrial, Ovarian | Lynch Syndrome |
| MUTYH | Colon | MYH-associated polyposis |
| NBN | Breast | |
| PALB2 | Pancreatic, Breast | |
| PMS2 | Colon, Endometrial, Ovarian | Lynch Syndrome |
| PTEN | Breast, Endometrial | Cowden Syndrome |
| RAD50 | Breast | |
| RAD51C | Breast, Ovarian | HBOC |
| RAD51D | Ovarian | HBOC |
| SMAD4 | GI | Juvenile Polyposis Syndrome |
| STK11 | GI, Breast | Peutz-Jeghers Syndrome |
| EPCAM | Colon, Endometrial, Ovarian | Lynch Syndrome |
| TP53 | Breast, Brain, Sarcoma | Li-Fraumeni Syndrome |

[0035] In some embodiments the panel of the disclosure to be assessed in a particular patient depends on the specific cancer(s) or syndrome(s) for which the patient is apparently at risk. For example, as shown in Example 2 below, a patient presenting with indicators of HBOC may be tested for a panel of test genes comprising Panel D (or Panel Q) or any subpanel comprising the top 2, 3, 4, 5, 6, 7, 8, 9, 10, 11, or 12 genes of Panel D (or Panel Q). Thus, in some embodiments of the methods and systems described above the patient is identified as having one or more indicators of a syndrome listed in Table 4, or otherwise having one or more indicators of an increased predisposition to one or more of the cancers listed in Table 4, and the patient is tested for a panel comprising genes whose mutations are associated with that syndrome or cancer. In some embodiments an indicator of a particular syndrome listed in Table 4 is present when the patient has one or more of the corresponding cancers listed in Table 4 (e.g., an indicator of Lynch syndrome may be endometrial cancer in the patient).

[0036] In some embodiments the genes of Panel Q may be added iteratively to BRCA1 and BRCA2, which may include reflex testing later genes upon determining the patient is negative for earlier genes. In some embodiments the panel of test genes comprises BRCA1, BRCA2 and CHEK2. In some embodiments, the panel of test genes comprises BRCA1, BRCA2, CHEK2; and any one, two or three of ATM, NBN and/or PALB2. In some embodiments, the panel of test genes comprises BRCA1, BRCA2, CHEK2; any one, two or three of ATM, NBN and/or PALB2; and any one or two of BARD1 and/or BRIP1. In some embodiments, the panel of test genes comprises BRCA1, BRCA2, CHEK2; any one, two or three of ATM, NBN and/or PALB2; any one or two of BARD1 and/or BRIP1; and PMS2. In some embodiments, the panel of test genes comprises BRCA1, BRCA2, CHEK2; any one, two or three of ATM, NBN and/or PALB2; any one or two of BARD1 and/or BRIP1; PMS2; and any one, two or three of MSH2, MSH6 and/or TP53. In some embodiments, the panel of test genes comprises BRCA1, BRCA2, CHEK2; any one, two or three of ATM, NBN and/or PALB2; any one or two of BARD1 and/or BRIP1; PMS2; any one, two or three of MSH2, MSH6 and/or TP53; and MUTYH.

[0037] In some embodiments, the disclosure provides a method of diagnosing increased risk of breast or ovarian cancer comprising (1) identifying the patient as having at least one indicator of a genetic predisposition to breast or ovarian cancer; (2) assaying a sample from the patient to detect one or more mutations in a plurality of test genes comprising at least 3 (e.g., the top 3, 4, 5, 6, 7, 8, 9, 10, 11 or 12) genes in Panel D; and (3)(a) diagnosing the patient as having an increased risk of breast or ovarian cancer if a mutation is detected in step (2) or (3)(b) diagnosing the patient as not having an increased risk of breast or ovarian cancer if no mutation is detected in step (2).

[0038] As used herein, “mutation” refers to a variation in a test sequence from a reference sequence, wherein such variation is known or expected to result in reduced or abolished function of the protein encoded by the relevant gene. The extent to which such a mutation leads to increased risk of cancer will in turn depend on the penetrance of the gene and the effect of the specific variation on the function of the encoded protein. Examples of mutations include variations where large sections of a gene (or an entire gene) are deleted, duplicated or inverted. In some embodiments, these large sections can be several hundred (e.g., 100, 200, 300, 400, 500, 600, 700, 800, 900) to several thousand bases long (e.g., 1,000, 2,000, 3,000, 4,000, 5,000, 6,000, 7,000, 8,000, 9,000, 10,000, 20,000, 30,000, 40,000, 50,000, 60,000, 70,000, 80,000, 90,000, 100,000 or more). Other examples of mutations include variations that result in a truncated protein product, such as nonsense mutations (variations where the codon for an amino acid is replaced by a codon for a translation stop) and frameshift mutations (variations adding or deleting a number of bases that is not a multiple of three). In some embodiments these truncating mutations result in loss of at least 1%, 2%, 3%, 4%, 5%, 6%, 7%, 8%, 9%, 10%, 15%, 20%, 25%, 30%, 35%, 40%, 45%, 50%, 60%, 70%, 80%, 90%, 95% of the amino acids found in the normal protein. Other examples of mutations include missense variations where a non-conservative change results at a position where an important amino acid is located in the normal protein. Important amino acids in this respect can include amino acids in catalytic sites, sites where the protein binds another molecule (e.g., another protein, DNA, etc.), or even simple internal or external amino acid sites (where a change from a hydrophobic to a hydrophilic amino acid, or from a hydrophilic to a hydrophobic amino acid, respectively, can significantly disrupt the overall structure and function of the protein). Other mutations can include base changes, whether in the exon or the intron, that disrupt proper splicing. Such splicing mutations need not change any amino acid at all, and can result in a processed transcript with missing or extra exons, with introns remaining, with a truncation, etc. Splicing mutations are often, though not necessarily, found within 5 to 20 bases of a splice site. Less commonly, mutations include so-called silent mutations that, though not changing the amino acid sequence of the encoded protein, result in lowered expression of the protein. These can include variations that, e.g., lead to an RNA transcript with lower stability, disrupt or lower efficiency of RNA processing, etc.

[0039] In some embodiments, an indicator of genetic predisposition to breast and/or ovarian cancer as discussed above is any of the following:
[0040] Personal and/or family history of ovarian cancer;
[0041] Personal and/or family history of breast cancer (e.g., diagnosed before a certain age (e.g., 35, 40, 45, 50, 55, 60, 65 or 70));
[0042] Personal and/or family history of two primary breast cancers;
[0043] Personal and/or family history of male breast cancer;
[0044] Personal and/or family history of triple negative breast cancer;
[0045] Ashkenazi Jewish descent with personal and/or family history of breast, ovarian, pancreatic, or aggressive prostate cancer (Gleason score of >7);
[0046] Personal and/or family history of three or more cancers chosen from breast, ovarian, pancreatic, or aggressive prostate cancer (Gleason score of >7); or
[0047] A previously identified mutation in any close blood relative in any of the at least 3 genes from Panel D.
   As used above, “breast cancer” includes both invasive cancer and ductal carcinoma in situ (DCIS) and “ovarian cancer” includes epithelial ovarian cancer, fallopian tube cancer, and primary peritoneal cancer. As used above, “personal history” of any of these indicators means patient has been identified as having the indicator (e.g., the patient has been diagnosed as having triple negative breast cancer). As used above, “family history” of any of these indicators means a close blood relative having such indicator and “close blood relative” means a 1^{st}, 2^{nd}, or 3^{rd} degree relative in either the maternal or paternal lineage.

[0048] In some embodiments, the disclosure provides a method of diagnosing increased risk of a Lynch syndrome cancer comprising (1) identifying the patient as having at least one indicator of a genetic predisposition to a Lynch syndrome cancer; (2) assaying a sample from the patient to detect one or more mutations in a plurality of test genes comprising at least 3 (e.g., the top 3, 4, 5, 6, 7, 8, 9, 10, 11 or 12) genes in Panel E; and (3)(a) diagnosing the patient as having an increased risk of the cancer if a mutation is detected in step (2) or (3)(b) diagnosing the patient as not having an increased risk of the cancer if no mutation is detected in step (2). As described in Example 3 below, the inventors have made the surprising discovery that mutations in BRCA1 and BRCA2 make a significant contribution to patients having Lynch syndrome. Thus in some embodiments the plurality of test genes comprises (a) MLH1, BRCA1, BRCA2; (b) MLH1, MSH2, BRCA1, BRCA2; (c) MLH1, MSH2, MSH6, BRCA1, BRCA2; (d) MLH1, MSH2, PMS2, BRCA1, BRCA2; (e) MLH1, MSH2, MUTYH, BRCA1, BRCA2; (f) MLH1, MSH2, MSH6, PMS2, BRCA1, BRCA2; (g) MLH1, MSH2, MSH6, PMS2, MUTYH, BRCA1, BRCA2; or (g) MLH1, MSH2, MSH6, PMS2, MUTYH, EPCAM, BRCA1, BRCA2.

[0049] In some embodiments, an indicator of genetic predisposition to a Lynch syndrome cancer is any of the following:
[0050] Personal and/or family history of colorectal or endometrial cancer (e.g., before a certain age (e.g., 35, 40, 45, 50, 55, 60, 65 or 70));
[0051] Personal and/or family history of colorectal cancer with MSI High histology (e.g., before a certain age (e.g., 35, 40, 45, 50, 55, 60, 65 or 70)), with examples of MSI high histology including any of the following:
   [0052] Mucinous
   [0053] Signet ring
   [0054] Tumor infiltrating lymphocytes
   [0055] Crohn's-like lymphocytic reaction
   [0056] Medullary growth pattern;
[0057] Personal and/or family history of colorectal or endometrial cancer with abnormal MSI/IHC tumor test result;
[0058] Personal and/or family history of two or more Lynch syndrome cancers, including cases where at least one is before a certain age (e.g., 35, 40, 45, 50, 55, 60, 65 or 70);
[0059] Personal history of Lynch syndrome cancer with family history of a Lynch syndrome cancer;
[0060] Three or more close blood relatives with a Lynch syndrome cancer; or
[0061] A previously identified mutation in any close blood relative in any of the at least 3 genes from Panel E.
   As used above, “Lynch syndrome cancer” may include any of the following: colorectal cancer, endometrial cancer, gastric cancer, ovarian cancer, ureter/renal pelvic cancer, biliary tract cancer, small bowel cancer, pancreatic cancer, brain cancer, or sebaceous adenomas. As used above, “personal history” of any of these indicators means patient has been identified as having the indicator (e.g., the patient has been diagnosed as having endometrial cancer). As used above, “family history” of any of these indicators means a close blood relative having such indicator and “close blood relative” means a 1^{st}, 2^{nd}, or 3^{rd} degree relative in either the maternal or paternal lineage.

[0062] The nucleic acids to be analyzed in the methods and systems of the disclosure may vary in size. Thus, in some embodiments A=10, 11, 12, 13, 14, 15, 16, 17, 18, 19, 20, 25, 30, 35, 40, 45, 50, 60, 70, 80, 90, 100, 125, 150, 175, 200, 250, 300, 350, 400, 450, 500, 600, 700, 800, 900, 1,000, 1,250, 1,500, 1,750, 2,000, 2,500, 3,000, 3,500, 4,000, 5,000, 6,000, 7,000, 8,000, 9,000, 10,000, 12,000, 14,000, 16,000, 18,000, 20,000, 25,000, 30,000, 35,000, 40,000, 45,000, 50,000, 60,000, 70,000, 80,000, or 90,000, or more and B=15, 16, 17, 18, 19, 20, 25, 30, 35, 40, 45, 50, 60, 70, 80, 90, 100, 125, 150, 175, 200, 250, 300, 350, 400, 450, 500, 600, 700, 800, 900, 1,000, 1,250, 1,500, 1,750, 2,000, 2,500, 3,000, 3,500, 4,000, 5,000, 6,000, 7,000, 8,000, 9,000, 10,000, 12,000, 14,000, 16,000, 18,000, 20,000, 25,000, 30,000, 35,000, 40,000, 45,000, 50,000, 60,000, 70,000, 80,000, 90,000, or 100,000 or more. These embodiments include every combination of A and B as set forth in the preceding sentence, where B>A. For example, the nucleic acids to be analyzed may comprise (or consist of or consist essentially of) a range of nucleotides in length from any A to any B (e.g., from 10 to 15, 10 to 20, [ . . . ] 100 to 125, 100 to 150, etc.).

[0063] In some embodiments the plurality of DNA molecules comprises at least some length of intronic sequence adjacent to some (or all) of said one or more exons. In some embodiments, the plurality of DNA molecules comprises at least 1, 2, 3, 4, 5, 6, 7, 8, 9, 10, 15, 20, 25, 30, 35, 40, 45, 50, 60, 70, 80, 90, 100, 200, 300, 400, 500 or more base pairs of the intronic sequence on one or both sides of the exon(s). This may comprise some portion of the sequences disclosed herein, using Table 3 as reference for where exons and introns begin and end. For example, in one embodiment the plurality of DNA molecules comprises the exons of, e.g., the APC gene plus at least 20 intronic nucleotides upstream and 10 intronic nucleotides downstream of each exon. For Exon 3 of APC, for example, this would mean the plurality of DNA molecules comprises Exon 3 (nucleotides 501-702 of SEQ ID NO:7) and further comprises the first 20 nucleotides of the intron upstream of Exon 3 (nucleotides 481-500 of SEQ ID NO:7) and the first 10 nucleotides of the intron downstream of Exon 3 (nucleotides 703-712 of SEQ ID NO:7). Those skilled in the art can apply this to the other genes, exons, and sequences referenced in Table 3.

[0064] As mentioned above, the nucleic acids to be analyzed in the methods and systems of the disclosure comprise one or more exons of a plurality of genes. As used herein, a plurality of nucleic acid molecules comprises a sequence or group of sequences if such plurality of molecules together comprises the sequence or group of sequences. Multiple molecules together comprise a single sequence when the non-redundant sequences of the multiple molecules comprise such sequence. For example, a plurality of molecules may comprise the sequence of Exon 3 of the APC gene, which is just over 200 nucleotides long, despite each molecule being no more than 60 nucleotides long. This is true if the non-redundant sequences from the plurality of molecules, when considered end to end, comprise the full sequence of Exon 3. This example is illustrated in FIG. 1, which shows how a plurality of DNA molecules can comprise Exon 3 of the APC gene plus 10 upstream and 10 downstream intronic nucleotides. No single molecule comprises all of Exon 3. When they are aligned, however, the non-redundant sequences of these molecules (underlined nucleotides in Read1 to Read6) “together” make up a sequence (Composite) that comprises Exon 3 of the APC gene plus 10 upstream and 10 downstream intronic nucleotides (underlined nucleotides of Composite). As illustrated in FIG. 1 (Read1 and Read2), the molecules to be analyzed may comprise additional moieties that may include additional nucleotides and nucleotide sequences, fluorescent labels, conjugated antibodies or other proteins. Such molecules may still together “comprise” the sequence of interest if the non-redundant nucleotide sequences of the molecules end-to-end comprise that sequence.

[0065] The total number of genes analyzed in the methods, systems and kits of the disclosure may vary depending on resource and technical constraints. Thus, in some embodiments W=2, 3, 4, 5, 6, 7, 8, 9, 10, 11, 12, 13, 14, 15, 16, 17, 18, 19, 20, 21, 22, 23, 24, 25, 26, 27, 28, 29, 30, 31, 32, 33, 34, 35, 36, 37, 38, 39, 40, 41, 42, 43, 44, 45, 46, 47, 48, 49, 50, 51, 52, 53, 54, 55, 56, 57, 58, 59, 60, 61, 62, 63, 64, 65, 66, 67, 68, or 69 or more and X=3, 4, 5, 6, 7, 8, 9, 10, 11, 12, 13, 14, 15, 16, 17, 18, 19, 20, 25, 30, 35, 40, 45, 50, 60, 70, 80, 90, 100, 125, 150, 175, 200, 250, 300, 350, 400, 450, 500, 600, 700, 800, 900, 1,000, 1,250, 1,500, 1,750, 2,000, 2,500, 3,000, 3,500, 4,000, 5,000, 6,000, 7,000, 8,000, 9,000, 10,000, 12,000, 14,000, 16,000, 18,000, or 20,000 or more. These embodiments include every combination of W and X as set forth in the preceding sentence, where X>W. For example, the plurality of genes to be analyzed may comprise (or consist of or consist essentially of) a range of genes in number from any W to any X (e.g., from 10 to 15, 10 to 20, [ . . . ] 100 to 125, 100 to 150, etc.).

[0066] The plurality of genes analyzed in the methods, systems and kits of the disclosure will comprise at least some of the genes listed in Panels A-R. Thus, in some embodiments the plurality of genes comprises at least 2, 3, 4, 5, 6, 7, 8, 9, 10, 11, 12, 13, 14, 15, 16, 17, 18, 19, 20, 21, 22, 23, 24, 25, 26, 27, 28, 29, 30, 31, 32, 33, 34, 35, 36, 37, 38, 39, 40, 41, 42, 43, 44, 45, 46, 47, 48, 49, 50, 51, 52, 53, 54, 55, 56, 57, 58, 59, 60, 61, 62, 63, 64, 65, 66, 67, 68, or 69 genes listed in Panels A-R. In some embodiments the plurality of genes comprises gene numbers between Y and Z of any of Panels A-R. In some such embodiments, Y=1, 2, 3, 4, 5, 6, 7, 8, 9, 10, 11, 12, 13, 14, 15, 16, 17, 18, 19, 20, 21, 22, 23, 24, 25, 26, 27, 28, 29, 30, 31, 32, 33, 34, 35, 36, 37, 38, 39, 40, 41, 42, 43, 44, 45, 46, 47, 48, 49, 50, 51, 52, 53, 54, 55, 56, 57, 58, 59, 60, 61, 62, 63, 64, 65, 66, 67 or 68 and Z=2, 3, 4, 5, 6, 7, 8, 9, 10, 11, 12, 13, 14, 15, 16, 17, 18, 19, 20, 21, 22, 23, 24, 25, 26, 27, 28, 29, 30, 31, 32, 33, 34, 35, 36, 37, 38, 39, 40, 41, 42, 43, 44, 45, 46, 47, 48, 49, 50, 51, 52, 53, 54, 55, 56, 57, 58, 59, 60, 61, 62, 63, 64, 65, 66, 67, 68, or 69. In some embodiments, said plurality of genes comprises gene numbers 1 & 2, 2 & 3, 3 & 4, 4 & 5, 5 & 6, 6 & 7, 7 & 8, 8 & 9, 9 & 10, 10 & 11, 11 & 12, 12 & 13, 13 & 14, 14 & 15, 15 & 16, 16 & 17, 17 & 18, 18 & 19, 19 & 20, 20 & 21, 21 & 22, 22& 23, 23& 24, 24& 25, 25& 26, 26& 27, 27& 28, 28& 29, 29& 30, 30& 31, 31& 32, 32& 33, 33 & 34, 34 & 35, 35 & 36, 36 & 37, 37 & 38, 38 & 39, 39 & 40, 40 & 41, 41 & 42, 42 & 43, 43 & 44, 44& 45, 45& 46, 46& 47, 47& 48, 48& 49, 49& 50, 50& 51, 51 & 52, 52& 53, 53& 54, 54& 55, 55& 56, 56& 57, 57& 58, 58& 59, 59& 60, 60& 61, 61 & 62, 62& 63, 63& 64, 64& 65, 65 & 66, 66 & 67, 67 & 68, or 68 & 69 from any of Panels A-R. These embodiments include every combination of Y and Z as set forth in the preceding sentences, where Y>Z. For example, the plurality of genes to be analyzed may comprise (or consist of or consist essentially of) a range of genes with a number from any Y to any Z in any of Panels A-R (e.g., from 1 to 2, 1 to 3, 1 to 4, [ . . . ] 1 to 55, 2 to 3, 2 to 4, 2 to 5, [ . . . ] 2 to 55, etc.). In some embodiments the genes chosen from Panels A-R comprise at least some percentage, e.g., 1%, 2%, 3%, 4%, 5%, 6%, 7%, 8%, 9%, 10%, 11%, 12%, 13%, 14%, 15%, 16%, 17%, 18%, 19%, 20%, 25%, 30%, 35%, 40%, 45%, 50%, 60%, 70%, 80%, 90%, 91%, 92%, 93%, 94%, 95%, 96%, 97%, 98%, 99%, or 100%, of the plurality of genes to be analyzed.

[0067] In some embodiments the plurality of DNA molecules comprises at least some length of intronic sequence adjacent to some (or all) of said one or more exons (e.g., as shown in the SEQ IDs of the present disclosure). In some embodiments, the plurality of DNA molecules comprises at least 1, 2, 3, 4, 5, 6, 7, 8, 9, 10, 15, 20, 25, 30, 35, 40, 45, 50, 60, 70, 80, 90, 100, 200, 300, 400, 500 or more base pairs of the intronic sequence.

[0068] In some embodiments, the plurality of genes comprises the genes in any of Panels A-R, with the proviso that the genes do not include one or more of BRCA1, BRCA2, PTEN, PALB2, CHEK2, BRIP1, BARD1, CDH1, ATM, RAD50, MRE11A, NBN, RAD51C, TP53, or STK11. In some embodiments, the plurality of genes comprises BRCA1, BRCA2, PTEN, PALB2, CHEK2, BRIP1, BARD1, CDH1, ATM, RAD50, MRE11A, NBN, RAD51C, TP53, and STK11 together with at least 1, 2, 3, 4, 5, 6, 7, 8, 9, 10 or more additional gene(s) (including gene number(s) 1, 2, 3, 4, 5, 6, 7, 8, 9, or 10) from any of Panels A-R.

[0069] In some embodiments, the plurality of genes comprises the genes in any of Panels A-R, with the proviso that the genes do not include one or more of MLH1, MSH2, MSH6, PMS2, EPCAM, APC or MUTYH. In some embodiments, the plurality of genes comprises MLH1, MSH2, MSH6, PMS2, EPCAM, APC and MUTYH together with at least 1, 2, 3, 4, 5, 6, 7, 8, 9, 10 or more additional gene(s) (including gene number(s) 1, 2, 3, 4, 5, 6, 7, 8, 9, or 10) from any of Panels A-R.

[0070] In some embodiments, the plurality of genes comprises the genes in any of Panels A-R, with the proviso that the genes do not include one or more of BRCA1, BRCA2, BRIP1, BARD1, CHEK2, MRE11A, NBN, RAD50, RAD51C, PALB2, TP53, PTEN, STK11, CDH1, ATM, MLH1, MSH2, MSH6, PMS1, PMS2 or MUTYH. In some embodiments, the plurality of genes comprises BRCA1, BRCA2, BRIP1, BARD1, CHEK2, MRE11A, NBN, RAD50, RAD51C, PALB2, TP53, PTEN, STK11, CDH1, ATM, MLH1, MSH2, MSH6, PMS1, PMS2 and MUTYH together with at least 1, 2, 3, 4, 5, 6, 7, 8, 9, 10 or more additional gene(s) (including gene number(s) 1, 2, 3, 4, 5, 6, 7, 8, 9, or 10) from any of Panels A-R.

[0071] In some embodiments, the plurality of genes comprises the genes in any of Panels A-R, with the proviso that the genes do not include one or more of PTEN, PALB2, STK11, CHEK2, ATM or TP53. In some embodiments, the plurality of genes comprises PTEN, PALB2, STK11, CHEK2, ATM and TP53 together with at least 1, 2, 3, 4, 5, 6, 7, 8, 9, 10 or more additional gene(s) (including gene number(s) 1, 2, 3, 4, 5, 6, 7, 8, 9, or 10) from any of Panels A-R.

[0072] In some embodiments, the plurality of genes comprises the genes in any of Panels A-R, with the proviso that the genes do not include one or more of MLH1, MSH2, MSH6, PMS2 or EPCAM. In some embodiments, the plurality of genes comprises MLH1, MSH2, MSH6, PMS2 and EPCAM together with at least 1, 2, 3, 4, 5, 6, 7, 8, 9, 10 or more additional gene(s) (including gene number(s) 1, 2, 3, 4, 5, 6, 7, 8, 9, or 10) from any of Panels A-R.

[0073] In some embodiments, the plurality of genes comprises the genes in any of Panels A-R, with the proviso that the genes do not include one or more of MLH1, MSH2, MSH6, or PMS2. In some embodiments, the plurality of genes comprises MLH1, MSH2, MSH6, and PMS2 together with at least 1, 2, 3, 4, 5, 6, 7, 8, 9, 10 or more additional gene(s) (including gene number(s) 1, 2, 3, 4, 5, 6, 7, 8, 9, or 10) from any of Panels A-R.

[0074] In some embodiments, the plurality of genes comprises the genes in any of Panels A-R, with the proviso that the genes do not include one or more of ACCA, COMT, CYP11B2, CYP19, CYP1A1, CYP1B1, EPHX, ERA, FASL, IGF2, INS, KLK10, MSH6, RAD51L3, SOD2, VDR, XPG, or XRCC2. In some embodiments, the plurality of genes comprises ACCA, COMT, CYP11B2, CYP19, CYP1A1, CYP1B1, EPHX, ERA, FASL, IGF2, INS, KLK10, MSH6, RAD51L3, SOD2, VDR, XPG, and XRCC2 together with at least 1, 2, 3, 4, 5, 6, 7, 8, 9, 10 or more additional gene(s) (including gene number(s) 1, 2, 3, 4, 5, 6, 7, 8, 9, or 10) from any of Panels A-R.

[0075] In some embodiments, the plurality of genes comprises the genes in any of Panels A-R, with the proviso that the genes do not include one or more of BRCA1, BRCA2, CHEK2, RAD51, or NBN. In some embodiments, the plurality of genes comprises BRCA1, BRCA2, CHEK2, RAD51, and NBN together with at least 1, 2, 3, 4, 5, 6, 7, 8, 9, 10 or more additional gene(s) (including gene number(s) 1, 2, 3, 4, 5, 6, 7, 8, 9, or 10) from any of Panels A-R.

[0076] In some embodiments, the plurality of genes comprises the genes in any of Panels A-R, with the proviso that the genes do not include one or more of ABL1, AKT1, ALK, APC, ATM, BRAF, CDH1, CDKN2A, CSF1R, CTNNB1, EGFR, ERBB2, ERBB4, FBXW7, FGFR1, FGFR2, FGFR3, FLT3, GNAS, HNF1A, HRAS, IDH1, JAK2, JAK3, KDR, KIT, KRAS, MET, MLH1, MPL, NOTCH1, NPM1, NRAS, PDGFRA, PIK3CA, PTEN, PTPN11, RB1, RET, SMAD4, SMARCB1, SMO, SRC, STK11, TP53, or VHL. In some embodiments, the plurality of genes comprises ABL1, AKT1, ALK, APC, ATM, BRAF, CDH1, CDKN2A, CSF1R, CTNNB1, EGFR, ERBB2, ERBB4, FBXW7, FGFR1, FGFR2, FGFR3, FLT3, GNAS, HNF1A, HRAS, IDH1, JAK2, JAK3, KDR, KIT, KRAS, MET, MLH1, MPL, NOTCH1, NPM1, NRAS, PDGFRA, PIK3CA, PTEN, PTPN11, RB1, RET, SMAD4, SMARCB1, SMO, SRC, STK11, TP53, and VHL together with at least one additional gene from any of Panels A-R.

[0077] As used herein, a “deficiency” in a gene means the presence of some sequence, copy number, expression or epigenetic variation from wild-type in the gene that leads to a deleterious change in function. Sequence variations include point mutations, small (e.g., less than 1,000 nucleotides) deletions and insertions (including frameshift mutations), large (e.g., greater than 1,000 nucleotides) deletions and insertions, and transversions (e.g., reversal of direction in a region of the gene). Copy number variations include amplifications and deletions of substantially an entire gene. Epigenetic variations include variations in methylation, acetylation, etc. In the case of tumor suppressors, a deleterious change in function will generally be attenuated function. Examples include lowered or abolished transcription, lowered or abolished protein expression, and lowered or abolished protein function. Many variations that will lead to such changes may be recognized by those skilled in the art based on the present disclosure, including frameshift or nonsense (premature stop) mutations; deletions, amplifications or transversions in large regions of the gene; missense mutations in critical interaction, structural or enzymatic regions; etc. In the case of oncogenes, a deleterious change in function will generally be heightened function. Examples include heightened transcription, heightened protein expression, and heightened protein function. Many variations that will lead to such changes may be recognized by those skilled in the art based on the present disclosure, including amplification of the gene and activating mutations in enzymatic regions.

[0078] As used herein, a “germline” deficiency is any deficiency that is found in the germline of the individual as opposed to deficiencies found only in somatic tissues. For example, a deficiency found in a tumor tissue may either have originated in the germline or arisen somatically. Germline deficiencies may be detected by analyzing various types of samples. Generally, these samples will contain or be derived from cells expected to represent the germline. Examples include white blood cells, germ cells, etc. In some embodiments the nucleic acid analyzed is genomic DNA from such a cell (or DNA (e.g., PCR amplified DNA) derived therefrom). In other embodiments, the nucleic acid analyzed is transcript RNA (or complementary DNA transcribed therefrom) from such a cell. In some embodiments, protein derived from such a cell is analyzed for structural (e.g., amino acid sequence) and functional deficiencies.

[0079] Those skilled in the art are familiar with various techniques for sequencing nucleic acids in a sample. Useful techniques include, but are not limited to, Sanger sequencing, sequencing by synthesis (e.g., as described in U.S. Pat. Nos. 6,828,100, 7,276,720, and 7,283,337 and U.S. application publication nos. US20110212437, US20110229877, US20110177498, US20120064599, and US20120058468), single-molecule sequencing (e.g., as described in U.S. Pat. Nos. 8,148,516 and 8,137,569 and U.S. application publication nos. US20110212437, US20110229877, US20110177498, US20120064599, and US20120058468), etc. Examples include techniques developed by Applied Biosystems™ (SOLiD™), Illumina™ (HiSeq™), 454™, Pacific Biosciences™ (SMRT™), and Oxford Nanopore™ (GridION™ and MinION™), each of which is well-known to those skilled in the art.

[0080] As discussed above, the methods of the disclosure generally involve sequencing a panel of genes described herein. With modern techniques, it is often possible to sequence tens, hundreds or thousands of genes. Indeed, it is possible to sequence the entire genome. Once such a global assay has been performed, one may then informatically analyze one or more subsets of genes (i.e., panels or, as often used herein, pluralities of test genes). After sequencing hundreds or thousands of genes in a sample, for example, one may analyze (e.g., informatically) the sequences of a panel or plurality of test genes comprising primarily genes in any of Panels A-R according to the present disclosure (e.g., to determine whether a patient has an increased risk of a particular cancer).

[0081] As used herein, a patient has an “increased risk” of a particular cancer if the probability of the patient developing that cancer (e.g., over the patient's lifetime, over some defined period of time (e.g., within 10 years), etc.) exceeds some reference probability or value. The reference probability may be the probability (i.e., prevalence) of the cancer across the general relevant patient population (e.g., all patients; all patients of a particular age, gender, ethnicity; patients having a particular cancer (and thus looking at the risk of a different cancer or an independent second primary of the same type as the first cancer); etc.). For example, if the lifetime probability of a particular cancer in the general population (or some specific subpopulation) is X % and a particular patient has been determined by the methods, systems or kits of the present disclosure to have a lifetime probability of that cancer of Y %, and if Y>X, then the patient has an “increased risk” of that cancer. Alternatively, the tested patient's probability may only be considered “increased” when it exceeds the reference probability by some threshold amount (e.g., at least 0.5, 0.75, 0.85, 0.90, 0.95, 1, 2, 3, 4, 5, 6, 7, 8, 9, or 10 or more fold or standard deviations greater than the reference probability; at least 1%, 2%, 3%, 4%, 5%, 6%, 7%, 8%, 9%, 10%, 11%, 12%, 13%, 14%, 15%, 16%, 17%, 18%, 19%, 20%, 25%, 30%, 35%, 40%, 45%, 50%, 60%, 70%, 80%, 90%, 91%, 92%, 93%, 94%, 95%, 96%, 97%, 98%, or 99% greater than the reference probability).

[0082] The results of any analyses according to the disclosure will often be communicated to physicians, genetic counselors and/or patients (or other interested parties such as researchers) in a transmittable form that can be communicated or transmitted to any of the above parties. Such a form can vary and can be tangible or intangible (e.g., electronic). The results can be embodied in descriptive statements, diagrams, photographs, charts, images or any other visual forms. For example, graphs showing expression or activity level or sequence variation information for various genes can be used in explaining the results. Diagrams showing such information for additional target gene(s) are also useful in indicating some testing results. The statements and visual forms can be recorded on a tangible medium such as papers, computer readable media such as floppy disks, compact disks, etc., or on an intangible medium, e.g., an electronic medium in the form of email or website on internet or intranet. In addition, results can also be recorded in a sound form and transmitted through any suitable medium, e.g., analog or digital cable lines, fiber optic cables, etc., via telephone, facsimile, wireless mobile phone, internet phone and the like.

[0083] Thus, the information and data on a test result can be produced anywhere in the world and transmitted to a different location. As an illustrative example, when a sequencing (or genotyping) assay is conducted outside the United States, the information and data on a test result may be generated, cast in a transmittable form as described above, and then imported into the United States. Accordingly, the present disclosure also encompasses methods and systems for producing a transmittable form of sequence information for at least one patient sample. The method comprises the steps of (1) sequencing nucleic acids in a sample according to methods of the present disclosure; and (2) embodying the result of the sequencing step in a transmittable form. The transmittable form is a product of such a method.

[0084] Techniques for analyzing sequence data (indeed any data obtained according to the disclosure) may be implemented using hardware, software or a combination thereof in one or more computer systems or other processing systems capable of effectuating such analysis.

[0085] The sample analyzer in the systems of the disclosure can be any instrument useful in sequencing nucleic acids, including but not limited to, Illumina HiSeq™, Ion Torrent PGM, ABI SOLiD™ sequencer, PacBio RS, Helicos Heliscope™, or any instrument utilizing a sequencing system discussed above.

[0086] The computer-based analysis function can be implemented in any suitable language and/or browsers. For example, it may be implemented with C language and preferably using object-oriented high-level programming languages such as Visual Basic, SmallTalk, C++, and the like. The application can be written to suit environments such as the Microsoft Windows™ environment including Windows™ 98, Windows™ 2000, Windows™ NT, and the like. In addition, the application can also be written for the MacIntosh™, SUN™, UNIX or LINUX environment. In addition, the functional steps can also be implemented using a universal or platform-independent programming language. Examples of such multi-platform programming languages include, but are not limited to, hypertext markup language (HTML), JAVA™, JavaScript™, Flash programming language, common gateway interface/structured query language (CGI/SQL), practical extraction report language (PERL), AppleScript™ and other system script languages, programming language/structured query language (PL/SQL), and the like. Java™- or JavaScript™-enabled browsers such as HotJava™, Microsoft™ Explorer™, or Netscape™ can be used. When active content web pages are used, they may include Java™ applets or ActiveX™ controls or other active content technologies.

[0087] The analysis function can also be embodied in computer program products and used in the systems described above or other computer- or internet-based systems. Accordingly, another aspect of the present disclosure relates to a computer program product comprising a computer-usable medium having computer-readable program codes or instructions embodied thereon for enabling a processor to carry out gene status analysis. These computer program instructions may be loaded onto a computer or other programmable apparatus to produce a machine, such that the instructions which execute on the computer or other programmable apparatus create means for implementing the functions or steps described above. These computer program instructions may also be stored in a computer-readable memory or medium that can direct a computer or other programmable apparatus to function in a particular manner, such that the instructions stored in the computer-readable memory or medium produce an article of manufacture including instruction means which implement the analysis. The computer program instructions may also be loaded onto a computer or other programmable apparatus to cause a series of operational steps to be performed on the computer or other programmable apparatus to produce a computer implemented process such that the instructions which execute on the computer or other programmable apparatus provide steps for implementing the functions or steps described above.

[0088] One example of a computer system of the disclosure is the computer system [200] illustrated in FIG. 2. Computer system [200] may include at least one input module [230] for entering patient data into the computer system [200]. The computer system [200] may include at least one output module [224] for indicating whether a patient has an increased or decreased likelihood of response and/or indicating suggested treatments determined by the computer system [200]. Computer system [200] may include at least one memory module [206] in communication with the at least one input module [230] and the at least one output module [224].

[0089] The at least one memory module [206] may include, e.g., a removable storage drive [208], which can be in various forms, including but not limited to, a magnetic tape drive, a floppy disk drive, a VCD drive, a DVD drive, an optical disk drive, etc. The removable storage drive [208] may be compatible with a removable storage unit [210] such that it can read from and/or write to the removable storage unit [210]. Removable storage unit [210] may include a computer usable storage medium having stored therein computer-readable program codes or instructions and/or computer readable data. For example, removable storage unit [210] may store patient data. Example of removable storage unit [210] are well known in the art, including, but not limited to, floppy disks, magnetic tapes, optical disks, and the like. The at least one memory module [206] may also include a hard disk drive [212], which can be used to store computer readable program codes or instructions, and/or computer readable data.

[0090] In addition, as shown in FIG. 2, the at least one memory module [206] may further include an interface [214] and a removable storage unit [216] that is compatible with interface [214] such that software, computer readable codes or instructions can be transferred from the removable storage unit [216] into computer system [200]. Examples of interface [214] and removable storage unit [216] pairs include, e.g., removable memory chips (e.g., EPROMs or PROMs) and sockets associated therewith, program cartridges and cartridge interface, and the like. Computer system [200] may also include a secondary memory module [218], such as random access memory (RAM).

[0091] Computer system [200] may include at least one processor module [202]. It should be understood that the at least one processor module [202] may consist of any number of devices. The at least one processor module [202] may include a data processing device, such as a microprocessor or microcontroller or a central processing unit. The at least one processor module [202] may include another logic device such as a DMA (Direct Memory Access) processor, an integrated communication processor device, a custom VLSI (Very Large Scale Integration) device or an ASIC (Application Specific Integrated Circuit) device. In addition, the at least one processor module [202] may include any other type of analog or digital circuitry that is designed to perform the processing functions described herein.

[0092] As shown in FIG. 2, in computer system [200], the at least one memory module [204], the at least one processor module [202], and secondary memory module [218] are all operably linked together through communication infrastructure [220], which may be a communications bus, system board, cross-bar, etc.). Through the communication infrastructure [220], computer program codes or instructions or computer readable data can be transferred and exchanged. Input interface [226] may operably connect the at least one input module [226] to the communication infrastructure [220]. Likewise, output interface [222] may operably connect the at least one output module [224] to the communication infrastructure [220].

[0093] The at least one input module [230] may include, for example, a keyboard, mouse, touch screen, scanner, and other input devices known in the art. The at least one output module [224] may include, for example, a display screen, such as a computer monitor, TV monitor, or the touch screen of the at least one input module [230]; a printer; and audio speakers. Computer system [200] may also include, modems, communication ports, network cards such as Ethernet cards, and newly developed devices for accessing intranets or the internet.

[0094] The at least one memory module [206] may be configured for storing patient data entered via the at least one input module [230] and processed via the at least one processor module [202]. Patient data relevant to the present disclosure may include sequence information for one or more of the genes in any of Panels A-R. Patient data relevant to the present disclosure may also include clinical parameters relevant to the patient (e.g., age, lifestyle and environmental risk factors for cancer, previously diagnosed diseases (including previously diagnosed cancers), tumor size, node status, tumor stage). Any patient data a physician might find useful in making treatment decisions/recommendations may also be entered into the system, including but not limited to age, gender, and race/ethnicity and lifestyle data such as diet information. Other possible types of patient data include symptoms currently or previously experienced, patient's history of illnesses, medications, and medical procedures.

[0095] The at least one memory module [206] may include a computer-implemented method stored therein. The at least one processor module [202] may be used to execute software or computer-readable instruction codes of the computer-implemented method. The computer-implemented method may be configured to, based upon the patient data, indicate whether the patient has an increased likelihood of recurrence, progression or response to any particular treatment, generate a list of possible treatments, etc.

[0096] In certain embodiments, the computer-implemented method may be configured to identify a patient as having or not having an increased risk of a particular cancer. For example, the computer-implemented method may be configured to inform a physician that a particular patient has an increased risk of a particular cancer. Alternatively or additionally, the computer-implemented method may be configured to actually suggest a particular course of treatment based on the answers to/results for various queries.

[0097] FIG. 3 illustrates one embodiment of a computer-implemented method [300] of the disclosure that may be implemented with the computer system [200] of the disclosure. The method [300] begins with one of multiple queries ([310], [311], [312]), either sequentially or substantially simultaneously. If the answer to/result for any of these queries is “Yes” [320], the method may diagnose [330] the patient as having an increased risk of a particular cancer (e.g., breast cancer if there is a germline deficiency in BRCA1). If the answer to/result for all of these queries is “No” [321], the method may diagnose [331] the patient as not having, at least based on germline status of the tested genes, an increased risk of cancer. The method [300] may then proceed with more queries, make a particular treatment recommendation ([340], [341]), or simply end.

[0098] When the queries are performed sequentially, they may be made in the order suggested by FIG. 3 or in any other order. Whether subsequent queries are made can also be dependent on the results/answers for preceding queries. In some embodiments of the method illustrated in FIG. 3, for example, the method asks about BRCA1 [311] first and, if the patient has a germline deficiency then the method concludes [330] or optionally confirms by BRCA2 status [311], and/or other HCG status [312]. Optionally, the method may query clinical parameters (e.g., tumor size, age, tumor stage) before or after querying any of the molecular characteristics of HCGs as shown. As mentioned above, the preceding order of queries may be modified. In some embodiments an answer of “yes” to one query (e.g., [310]) prompts one or more of the remaining queries to confirm that the patient has, e.g., increased risk of recurrence.

[0099] In some embodiments, the computer-implemented method of the disclosure [300] is open-ended. In other words, the apparent first step [310] in FIG. 3 may actually form part of a larger process and, within this larger process, need not be the first step/query. Additional steps may also be added onto the core methods discussed above. These additional steps include, but are not limited to, informing a health care professional (or the patient itself) of the diagnosis reached; combining the conclusion reached by the illustrated method [300] with other facts or conclusions to reach some additional or refined conclusion regarding the patient's diagnosis, prognosis, treatment, etc.; making a recommendation for treatment (e.g., “patient should/should not undergo prophylactic mastectomy”); additional queries about additional biomarkers, clinical parameters (e.g., age, tumor size, node status, tumor stage), or other useful patient information (e.g., age at diagnosis, general patient health, etc.).

[0100] Regarding the above computer-implemented method [300], the answers to the queries may be determined by the method instituting a search of patient data for the answer. For example, to answer the respective queries ([310], [311], [312]), patient data may be searched for germline sequence data for the HCGs to be analyzed (e.g., two or more of the genes in Panel B or Panel N). The queries may be performed in no particular order or according to some desired order (e.g., in order of gene number in Panel B or Panel N). If such a comparison has not already been performed, the method may compare these data to some reference (e.g., reference sequence) in order to determine if the patient has a germline deficiency in any of the HCGs being analyzed. Additionally or alternatively, the method may present one or more of the queries ([310], [311], [312]) to a user of the computer system [200] (e.g., a physician). For example, the questions ([310], [311], [312]) may be presented via an output module [224]. The user may then answer “Yes” or “No” or provide some other value (e.g., numerical or qualitative value representing germline HCG status) via an input module [230]. The method may then proceed based upon the answer received. Likewise, the conclusions [330, 331] may be presented to a user of the computer-implemented method via an output module [224].

[0101] The practice of the present disclosure may also employ conventional biology methods, software and systems. Computer software products of the disclosure typically include computer readable media having computer-executable instructions for performing the logic steps of the method of the disclosure. Suitable computer readable medium include floppy disk, CD-ROM/DVD/DVD-ROM, hard-disk drive, flash memory, ROM/RAM, magnetic tapes and etc. Basic computational biology methods are described in, for example, Setubal et al., INTRODUCTION TO COMPUTATIONAL BIOLOGY METHODS (PWS Publishing Company, Boston, 1997); Salzberg et al. (Ed.), COMPUTATIONAL METHODS IN MOLECULAR BIOLOGY, (Elsevier, Amsterdam, 1998); Rashidi & Buehler, BIOINFORMATICS BASICS: APPLICATION IN BIOLOGICAL SCIENCE AND MEDICINE (CRC Press, London, 2000); and Ouelette & Bzevanis, BIOINFORMATICS: A PRACTICAL GUIDE FOR ANALYSIS OF GENE AND PROTEINS (Wiley & Sons, Inc., 2^{nd} ed., 2001); see also, U.S. Pat. No. 6,420,108.

[0102] The present disclosure may also make use of various computer program products and software for a variety of purposes, such as probe design, management of data, analysis, and instrument operation. See U.S. Pat. Nos. 5,593,839; 5,795,716; 5,733,729; 5,974,164; 6,066,454; 6,090,555; 6,185,561; 6,188,783; 6,223,127; 6,229,911 and 6,308,170. Additionally, the present disclosure may have embodiments that include methods for providing genetic information over networks such as the Internet as shown in U.S. Ser. No. 10/197,621 (U.S. Pub. No. 20030097222); Ser. No. 10/063,559 (U.S. Pub. No. 20020183936), Ser. No. 10/065,856 (U.S. Pub. No. 20030100995); Ser. No. 10/065,868 (U.S. Pub. No. 20030120432); Ser. No. 10/423,403 (U.S. Pub. No. 20040049354).

[0103] The terms “probe” and “oligonucleotide” (also “oligo”), when used in the context of nucleic acids, interchangeably refer to a relatively short nucleic acid fragment or sequence. The disclosure also provides primers useful in the methods of the disclosure. “Primers” are oligonucleotides capable, under the right conditions and with the right companion reagents, of selectively amplifying a target nucleic acid (e.g., a target exon or gene). In the context of nucleic acids, unless indicated otherwise, “probe” is used herein to encompass “primer” since primers can generally also serve as probes.

[0104] The probe can generally be of any suitable size/length. In some embodiments the probe is between A and B nucleotides in length. In some embodiments A=10, 11, 12, 13, 14, 15, 16, 17, 18, 19, 20, 25, 30, 35, 40, 45, 50, 60, 70, 80, 90, 100, 125, 150, 175, 200, 250, 300, 350, 400, 450, 500, 600, 700, 800, 900, 1,000, 1,250, 1,500, 1,750, 2,000, 2,500, 3,000, 3,500, 4,000, 5,000, 6,000, 7,000, 8,000, 9,000, 10,000, 12,000, 14,000, 16,000, 18,000, 20,000, 25,000, 30,000, 35,000, 40,000, 45,000, 50,000, 60,000, 70,000, 80,000, or 90,000, or more and B=15, 16, 17, 18, 19, 20, 25, 30, 35, 40, 45, 50, 60, 70, 80, 90, 100, 125, 150, 175, 200, 250, 300, 350, 400, 450, 500, 600, 700, 800, 900, 1,000, 1,250, 1,500, 1,750, 2,000, 2,500, 3,000, 3,500, 4,000, 5,000, 6,000, 7,000, 8,000, 9,000, 10,000, 12,000, 14,000, 16,000, 18,000, 20,000, 25,000, 30,000, 35,000, 40,000, 45,000, 50,000, 60,000, 70,000, 80,000, 90,000, or 100,000 or more. These embodiments include every combination of A and B as set forth in the preceding sentence, where B>A. For example, the probe may comprise (or consist of or consist essentially of) a range of nucleotides in length from any A to any B (e.g., from 10 to 15, 10 to 20, [ . . . ] 100 to 125, 100 to 150, etc.). In some embodiments the probe has a length from about 8 to 200, 15 to 150, 15 to 100, 15 to 75, 15 to 60, or 20 to 55 bases in length. They can be labeled with detectable markers with any suitable detection marker including but not limited to, radioactive isotopes, fluorophores, biotin, enzymes (e.g., alkaline phosphatase), enzyme substrates, ligands and antibodies, etc. See Jablonski et al., NUCLEIC ACIDS RES. (1986) 14:6115-6128; Nguyen et al., BIOTECHNIQUES (1992) 13:116-123; Rigby et al., J. MOL. BIOL. (1977) 113:237-251. Indeed, probes may be modified in any conventional manner for various molecular biological applications. Techniques for producing and using such oligonucleotide probes are conventional in the art.

[0105] Probes according to the disclosure can be used in the hybridization, amplification, detection or sequencing techniques discussed above. Thus, some embodiments of the disclosure comprise probe sets (including primer sets) suitable for use in detecting, amplifying, quantitating, and/or sequencing genes or gene panels of the disclosure. In some embodiments the probe sets have a certain proportion of their probes directed to genes or gene panels of the disclosure (e.g., genes in any of Panels A-R)—e.g., a probe set comprising (or consisting of) 1%, 2%, 3%, 4%, 5%, 6%, 7%, 8%, 9%, 10%, 11%, 12%, 13%, 14%, 15%, 16%, 17%, 18%, 19%, 20%, 25%, 30%, 35%, 40%, 45%, 50%, 60%, 70%, 80%, 90%, 91%, 92%, 93%, 94%, 95%, 96%, 97%, 98%, 99%, or 100% probes specific for HCGs.

[0106] The total number of genes to which the probes in the probe set are directed may vary depending on resource and technical constraints. In some embodiments the probe set comprises (or consists of or consists essentially of) probes directed to between W and X genes, where W=2, 3, 4, 5, 6, 7, 8, 9, 10, 11, 12, 13, 14, 15, 16, 17, 18, 19, 20, 21, 22, 23, 24, 25, 26, 27, 28, 29, 30, 31, 32, 33, 34, 35, 36, 37, 38, 39, 40, 41, 42, 43, 44, 45, 46, 47, 48, 49, 50, 51, 52, 53, 54, or 55 or more and X=3, 4, 5, 6, 7, 8, 9, 10, 11, 12, 13, 14, 15, 16, 17, 18, 19, 20, 25, 30, 35, 40, 45, 50, 60, 70, 80, 90, 100, 125, 150, 175, 200, 250, 300, 350, 400, 450, 500, 600, 700, 800, 900, 1,000, 1,250, 1,500, 1,750, 2,000, 2,500, 3,000, 3,500, 4,000, 5,000, 6,000, 7,000, 8,000, 9,000, 10,000, 12,000, 14,000, 16,000, 18,000, or 20,000 or more. These embodiments include every combination of W and X as set forth in the preceding sentence, where X>W. For example, the plurality of genes to which probes in the probes set are directed may comprise (or consist of or consist essentially of) a range of genes in number from any W to any X (e.g., from 10 to 15, 10 to 20, [ . . . ] 100 to 125, 100 to 150, etc.).

[0107] In some embodiments the genes to which probes in the probe set are directed will comprise at least some of the genes listed in Panels A-R. Thus, in some embodiments the probe set comprises probes directed to at least 2, 3, 4, 5, 6, 7, 8, 9, 10, 11, 12, 13, 14, 15, 16, 17, 18, 19, 20, 21, 22, 23, 24, 25, 26, 27, 28, 29, 30, 31, 32, 33, 34, 35, 36, 37, 38, 39, 40, 41, 42, 43, 44, 45, 46, 47, 48, 49, 50, 51, 52, 53, 54, or 55 genes listed in Panels A-R. In some embodiments the probe set comprises probes directed to between Y and Z gene of any of Panels A-R, wherein Y=1, 2, 3, 4, 5, 6, 7, 8, 9, 10, 11, 12, 13, 14, 15, 16, 17, 18, 19, 20, 21, 22, 23, 24, 25, 26, 27, 28, 29, 30, 31, 32, 33, 34, 35, 36, 37, 38, 39, 40, 41, 42, 43, 44, 45, 46, 47, 48, 49, 50, 51, 52, 53, or 54 and Z=2, 3, 4, 5, 6, 7, 8, 9, 10, 11, 12, 13, 14, 15, 16, 17, 18, 19, 20, 21, 22, 23, 24, 25, 26, 27, 28, 29, 30, 31, 32, 33, 34, 35, 36, 37, 38, 39, 40, 41, 42, 43, 44, 45, 46, 47, 48, 49, 50, 51, 52, 53, 54, 55. In some embodiments, said plurality of genes comprises gene numbers 1 & 2, 2 & 3, 3 & 4, 4 & 5, 5 & 6, 6 & 7, 7 & 8, 8 & 9, 9 & 10, 10 & 11, 11 & 12, 12 & 13, 13 & 14, 14 & 15, 15 & 16, 16 & 17, 17 & 18, 18 & 19, 19 & 20, 20 & 21, 21 & 22, 22 & 23, 23 & 24, 24 & 25, 25 & 26, 26 & 27, 27 & 28, 28 & 29, 29 & 30, 30 & 31, 31 & 32, 32 & 33, 33 & 34, 34 & 35, 35 & 36, 36 & 37, 37 & 38, 38 & 39, 39& 40, 40& 41, 41 & 42, 42& 43, 43 & 44, 44& 45, 45 & 46, 46& 47, 47& 48, 48& 49, 49& 50, 50 & 51, 51 & 52, 52 & 53, 53 & 54, or 54 & 55 from any of Panels A-R. These embodiments include every combination of Y and Z as set forth in the preceding sentences, where Y>Z. For example, the probe set comprises (or consists of or consists essentially of) probes directed to a range of genes with a number from any Y to any Z in any of Panels A-R (e.g., from 1 to 2, 1 to 3, 1 to 4, [ . . . ] 1 to 55, 2 to 3, 2 to 4, 2 to 5, [ . . . ] 2 to 55, etc.).

[0108] As used herein, a probe (or primer) is “directed to” a gene when such probe hybridizes under certain minimal stringency conditions (e.g., high stringency conditions) to a nucleic acid comprising a nucleotide sequence specific for such gene (e.g., in the genome essentially only found in that gene). Examples include, but are not limited to, relatively low salt and/or high temperature conditions, such as provided by about 0.02 M to about 0.10M NaCl at temperatures of about 50° C. to about 70° C. For example, a medium stringency condition could be provided by about 0.1 to 0.25 M NaCl at temperatures of about 37° C. to about 55° C., while a low stringency condition could be provided by about 0.15 M to about 0.9 M salt, at temperatures ranging from about 20° C. to about 55° C. In other embodiments, hybridization may be achieved under conditions of, for example, 50 mM Tris-HCl (pH 8.3), 75 mM KCl, 3 mM MgCl₂, 1.0 mM dithiothreitol, at temperatures between approximately 20° C. to about 37° C. Other hybridization conditions utilized could include approximately 10 mM Tris-HCl (pH 8.3), 50 mM KCl, 1.5 mM MgCl₂, at temperatures ranging from approximately 40° C. to about 72° C.

[0109] In some embodiments a probe (or primer) is “directed to” a gene when such probe shares at least some minimum level of sequence homology with a portion of such gene (particularly portions of such gene which are unique to the gene, i.e., not shared with other portions of the genome). In some embodiments the probe shares at least 75%, 80%, 85%, 90%, 95%, 96%, 97%, 98%, 99% or 100% sequence identity (as determined by, e.g., the BLAST algorithm) with a portion of the gene that is at least 15, 16, 17, 18, 19, 20, 21, 22, 23, 24, 25, 26, 27, 28, 29, 30, 35, 40, 45, 50, 55, 60, 65, 70, 75, 80, 85, 90, 100, 125, 150, 175, 200, 250, 300, 350, 400, 450, 500 or more bases long. In this respect, the probe or primer will comprise such homologous sequence and may additionally comprise numerous other moieties, including additional nucleotide sequences (e.g., adapters for sequencing).

[0110] In another aspect of the present disclosure, a kit is provided for practicing the diagnosis of the present disclosure. The kit may include a carrier for the various components of the kit. The carrier can be a container or support, in the form of, e.g., bag, box, tube, rack, and is optionally compartmentalized. The carrier may define an enclosed confinement for safety purposes during shipment and storage. The kit many include oligonucleotides directed to (e.g., specifically hybridizing under high stringency to) DNA having all or part of the germline sequence of a plurality of genes in any of Panels A-R (e.g., genomic DNA extracted from a patient sample, synthetic DNA synthesized using such genomic DNA, etc.). Such oligonucleotides can be used as PCR primers in PCR reactions, as hybridization probes, etc. In some embodiments the kit comprises reagents (e.g., probes, primers, and or antibodies) for determining the sequence of a panel of genes, where said panel comprises at least 25%, 30%, 40%, 50%, 60%, 75%, 80%, 90%, 95%, 99%, or 100% genes in any of Panels A-R. In some embodiments the kit consists of reagents (e.g., probes, primers, and or antibodies) for determining the expression level of no more than 2500 genes, wherein at least 2, 3, 4, 5, 6, 7, 8, 9, 10, 15, 20, 30, 40, 50, 60, 70, 80, 90, 100, 120, 150, 200, 250, or more of these genes are HCGs (e.g., HCGs in any of Panels A-R).

[0111] The oligonucleotides in the detection kit can be labeled with any suitable detection marker including but not limited to, radioactive isotopes, fluorephores, biotin, enzymes (e.g., alkaline phosphatase), enzyme substrates, ligands and antibodies, etc. See Jablonski et al., NUCLEIC ACIDS RES., 14:6115-6128 (1986); Nguyen et al., BIOTECHNIQUES, 13:116-123 (1992); Rigby et al., J. MOL. BIOL., 113:237-251 (1977). Alternatively, the oligonucleotides included in the kit are not labeled, and instead, one or more markers are provided in the kit so that users may label the oligonucleotides at the time of use.

[0112] Various other components useful in the detection techniques may also be included in the detection kit of this disclosure. Examples of such components include, but are not limited to, Taq polymerase, deoxyribonucleotides, dideoxyribonucleotides, other primers suitable for the amplification of a target DNA sequence, RNase A, and the like. In addition, the detection kit preferably includes instructions on using the kit for practice the diagnostic method of the present disclosure using human samples.

### Example 1

[0113] Biological samples from patients that can yield germline DNA are obtained. Genomic DNA is extracted from biological samples, purified, and quantitated. Genomic regions of interest (i.e., exons of the genes of interest plus on average 10 flanking intronic nucleotides on each side of each exon) are enriched by amplification using primers specific for these regions. Genes analyzed in this example are those of Panel F.

[0114] Genomic DNA is fragmented and subjected to a merge on a RainDance instrument with a target enrichment PCR primer library. The library is designed to amplify approximately 1,200 targets covering all coding regions (plus on average 10 flanking intronic nucleotides on each side of each exon) of the genes in Panel F. Specifically, one micro-droplet at a time, the merging process melds together in an oil phase a micro-droplet containing one or more DNA fragments from the patient sample (or derived, e.g., amplified, therefrom) with a micro-droplet containing thousands of copies of one or more primer pairs targeting widely-spaced unique positions of interest (this example involves 5 primer pairs as one preferred embodiment, but 1, 2, 3, 4, 5, 6, 7, 8, 9, 10, 15, 20, 25, 30, 35, 40, 45, 50, 60, 70, 80, 90, 100 or more primer pairs may be used within a droplet). The process is repeated approximately from 1 to 2 million times. The collection of merged droplets is subjected to emulsion PCR amplification. The emulsion is disrupted, cleaned up, and subjected to secondary PCR that tails the primary PCR products with sequencing primers, anchors and an indexing barcode for the Illumina sequencing process. Samples from one or more patients are pooled together for sequencing (this example involves pooling of samples from 96 patients, but samples from 2, 3, 4, 5, 6, 7, 8, 9, 10, 15, 20, 25, 30, 35, 40, 45, 50, 60, 70, 80, 90, 100, 110, 120, 130, 140, 150, 160, 170, 180, 190, 192, 200, 225, 250, 275, 300 or more patients may be pooled).

[0115] Some genes (e.g., PMS2, CHEK2) encompass genomic areas with pseudogenes. Pseudogenes may interfere with normal sequencing. For those genes, genomic DNA is also amplified with gene-specific primers to produce long range PCR products. The long range PCR products are used as surrogate gene targets for sequencing. Specifically, the long range products are amplified with a 4-primer PCR mix containing Illumina adapter-tailed primary nested primer sets specific to the genes, as well as secondary primers containing sequencing chip anchor sequences, indexing barcodes and designed to prime off the Illumina adapter tails of the primary primers.

[0116] Amplified DNA is sequenced using the Illumina MiSeq™ (or analogous HiSeq™) system according to the manufacturer's protocol. This system yields high quality sequence data for each exon amplified.

[0117] Sequence data are compared to reference sequences using alignment software to determine whether each patient has a germline variation in any of the genes of interest. Further analysis is performed to determine whether any such variation is deleterious, including looking for nonsense and frame-shift variants or large rearrangements.

### Example 2

[0118] This Example 2 describes a study performed to assess a panel of the disclosure in a large population of patients suspected of having hereditary breast and ovarian cancer syndrome (HBOC), e.g., patients suspected of having a BRCA1 and/or BRCA2 mutation. The details of DNA preparation and sequencing were as described in Example 1 above, except Panel B was assessed instead of Panel F. DNA from 1955 prospectively accrued cases was anonymized for this study. Patients with Ashkenazi Jewish heritage were excluded in order to determine the relative prevalence of mutations in a generalizable population. Extracted genomic DNA from blood was hybridized with a custom amplicon library on a Raindance™ ThunderStorm™ instrument. DNA was sequenced on an Illumina™ HiSeq2500™ system. Sequence variations, large rearrangements and large deletions among the 25 genes of Panel B were detected.

[0119] A total of 275/1955 (14.07%) patients were found to be mutation carriers in at least one of the genes of Panel B. 182/1955 (9.31%) patients had a mutation in BRCA1 or BRCA2. 96/1955 (4.91%) patients had a mutation in other genes. The distribution by gene of 96 probands with other gene mutations is shown in Table A below. The genes of Table A form yet another panel of the disclosure (Panel Q) and these genes, together with the BRCA1 and BRCA2 genes, form Panel D.

TABLE A
Panel Q

| | Gene | # patients with | |
|---|---|---|---|
| Gene # | Symbol | mutation | (%) |
| 1 | CHEK2 | 30 | 31.25% |
| 2 | ATM | 14 | 14.58% |
| 3 | NBN | 14 | 14.58% |
| 4 | PALB2 | 13 | 13.54% |
| 5 | BARD1 | 7 | 7.29% |
| 6 | BRIP1 | 7 | 7.29% |
| 7 | PMS2 | 4 | 4.17% |
| 8 | MSH2 | 2 | 2.08% |
| 9 | MSH6 | 2 | 2.08% |
| 10 | TP53 | 2 | 2.08% |
| 11 | MUTYH | 1 | 1.04% |

[0120] 1738/1955 patients had a personal history of breast cancer. In 1091/1738 the incidence of breast cancer occurred prior to age 50, in 647/1738 the incidence of breast cancer occurred at or after age 50. Mutation prevalence for patients with breast cancer only, ovarian cancer only, breast and ovarian cancer or other HBOC cancers is shown in Table B below. 1902 of 1955 (97.29%) patients had a variant of uncertain clinical significance (VUS) in at least one of the genes tested with a median of three VUSs per patient.

TABLE B

| | | | | | | Other | |
|---|---|---|---|---|---|---|---|
| | Patients | Mutation | | BRCA1/ | | Panel B | |
| Patient Cancer History | (n) | Carriers | | BRCA2 | | Gene | |
| Breast CA <50 years | 1091 | 167 | (15.31%) | 116* | (10.63%) | 51 | (4.67%) |
| Breast CA ≧50 years | 647 | 70 | (10.82%) | 40** | (6.18%) | 30 | (4.64%) |
| Ovarian CA | 162 | 23 | (14.20%) | 17 | (10.49%) | 6 | (3.70%) |
| Breast and Ovarian CA | 40 | 12 | (30.00%) | 8 | (20.00%) | 4 | (10.00%) |
| Other HBOC Cancer | 15 | 3 | (20.00%) | 1 | (6.67%) | 2 | (13.33%) |

*2 and **1 patients had an additional mutation in a non-BRCA1/2 gene.

[0121] Panel B (more specifically Panel D) increased clinical sensitivity by 4.76% (95% C.I., 2.71-6.81%) in this study sample of 1955 patients as compared to BRCA1/BRCA2 testing alone. The observed improvement in clinical sensitivity achieved over BRCA1/BRCA2 testing alone is 51.1%. Thus, among cancer patients at risk for HBOC, Panel B (more specifically Panel D) results in a greater than 50% increase in mutation detection over current BRCA1/BRCA2 clinical testing. Panel Q and preferably Panel D (or subpanels comprising the top 2, 3, 4, 5, 6, 7, 8, 9, 10, 11, or 12 genes thereof) can therefore be particularly useful in targeted assessment of cancer risk in patients at risk of having HBOC.

### Example 3

[0122] This Example 3 describes a study performed to assess a panel of the disclosure in a population of patients suspected of having Lynch syndrome, e.g., patients submitted for testing of mismatch repair (MMR) genes (MLH1, MSH2, MSH6, PMS2, and EPCAM) based on having an indicator of Lynch syndrome. The details of DNA preparation and sequencing were as described in Example 1 above, except Panel B was assessed instead of Panel F. DNA from 343 prospectively accrued cases was anonymized for this study. Extracted genomic DNA from blood was hybridized with a custom amplicon library on a Raindance™ ThunderStorm™ instrument. DNA was sequenced on an Illumina™ HiSeq2500™ system. Sequence variations, large rearrangements and large deletions among the 25 genes of Panel B were detected.

[0123] Out of 343 cases, 45 (13%) had a mutation in MLH1, MSH2, MSH6 or PMS2. Out of 298 cases negative for these genes, other deleterious mutations were found as shown in Table C. The genes of Panel R can be added to the MMR genes to form Panel E of the disclosure.

TABLE C
Panel R

| | | | MMR mutation | |
|---|---|---|---|---|
| | | | negative cases with | |
| | | Cases w/ | other gene mutation | |
| | | deleterious | | % of total |
| Gene # | Gene Symbol | mutation | # | patients |
| 1 | BRCA2 | 6 | 6 | 1.75% |
| 2 | BRCA1 | 3 | 3 | 0.87% |
| 3 | RAD50 | 3 | 2 | 0.58% |
| 4 | BRIP1 | 2 | 2 | 0.58% |
| 5 | CHEK2 | 2 | 2 | 0.58% |
| 6 | ATM | 2 | 1 | 0.29% |
| 7 | BARD1 | 1 | 1 | 0.29% |
| 8 | MUTYH Bi-Allelic | 1 | 1 | 0.29% |
| | MUTYH Mono-Allelic | 7 | 5 | 1.46% |
| | Total excluding MYH | 20 | 18 | 5.25% |
| | mono-allelic | | | |

[0124] Panel E increased clinical sensitivity by 5.25% in this study sample of 343 patients as compared to MMR gene testing alone. The observed improvement in clinical sensitivity achieved over MMR gene testing alone is 40.4%. To better understand the contribution of BRCA1 and BRCA2 to these suspected Lynch syndrome patients, the type of cancer that was the indicator for Lynch syndrome testing in the nine BRCA1- or BRCA2-positive patients was analyzed. All nine patients had at least on indicator of Lynch syndrome. In four cases, distinct indicators for both Lynch syndrome and HBOC (i.e., indicators not shared between the syndromes) were present. In four other cases, only indicators for Lynch syndrome were present. In one case, only a shared indicator for both Lynch syndrome and HBOC (i.e., ovarian cancer) was present. Even excluding this ovarian cancer case, BRCA2 and BRCA1 alone out of Panel E increased sensitivity by 2.33% over testing only the MMR genes. This translates to an observed improvement in clinical sensitivity over MMR gene testing alone of 17.9%. Thus, among cancer patients at risk for Lynch syndrome, Panel E results in a 40% increase in mutation detection over current MMR gene testing alone. Panel R and preferably Panel E (or subpanels comprising the top 2, 3, 4, 5, 6, 7, 8, 9, 10, or 11 genes thereof) can therefore be particularly useful in targeted assessment of cancer risk in patients at risk of having Lynch syndrome.

[0125] Under an alternative analysis of these data, 47 out of 343 cases (13%) had a pathogenic mutation in at least one of the five classical genes underlying Lynch Syndrome. All 343 subjects had a personal history of cancer and/or polyps. 19/343 (6%) were found to have pathogenic mutations in at least one of the 20 non-Lynch Syndrome genes tested, including four subjects with multiple pathogenic mutations (one of whom also had Lynch Syndrome). 10/19 (53%) subjects with non-LS mutations carried mutations in BRCA1 and/or BRCA2. Mutation carriers' personal and family histories of Lynch Syndrome neoplasia were as shown in Table D.

TABLE D

| | Personal history of LS | Family history of LS |
|---|---|---|
| Mutation(s) found | cancer/polyps | neoplasia |
| BRCA1 only (n = 4) | CR (n-2), EC (1), ≧2 types of LS | None/unknown (1), “other” |
| | neoplasia (1) | LS cancer (1), ≧2 types of |
| | | LS neoplasia (2) |
| BRCA2 only (n = 5) | CR and EC (1), CR (2), EC (1), | None/unknown (1), “other” |
| | CR (1), no CR, EC, or “other” | LS cancer (1), ≧2 types of |
| | LS cancers (1) | LS neoplasia (2) |
| BRCA2 & MUTYH (n = 1) | ≧2 types of LS neoplasia | CR |
| BRIP1 & CHEK2 (n = 1) | ≧2 types of LS neoplasia | ≧2 types of LS neoplasia |
| BRIP1 & NBN (n = 1) | “other” LS cancer(s) | CR |
| ATM & MLH1 (n = 1) | EC | ≧2 types of LS neoplasia |
| APC only (n = 1) | CR | CR |
| ATM only (n = 1) | “other” LS cancer(s) | “other” LS cancer |
| BARD1 only (n = 1) | ≧2 types of LS neoplasia | ≧2 types of LS neoplasia |
| BMPR1A only (n = 1) | ≧2 types of LS neoplasia | None/unknown |
| CHEK2 only (n = 1) | CR | CR |
| NBN only (n = 1) | ≧2 types of LS neoplasia | EC |

CR = colorectal cancer(s) and/or polyp(s);
EC = endometrial cancer(s)

[0126] Panel E increased clinical sensitivity by 5.25% in this study sample of 343 patients as compared to MMR gene testing alone. The observed improvement in clinical sensitivity achieved over MMR gene testing alone is 40.4%. To better understand the contribution of BRCA1 and BRCA2 to these suspected Lynch syndrome patients, the type of cancer that was the indicator for Lynch syndrome testing in the nine BRCA1- or BRCA2-positive patients was analyzed. All nine patients had at least on indicator of Lynch syndrome. In four cases, distinct indicators for both Lynch syndrome and HBOC (i.e., indicators not shared between the syndromes) were present. In four other cases, only indicators for Lynch syndrome were present. In one case, only a shared indicator for both Lynch syndrome and HBOC (i.e., ovarian cancer) was present. Even excluding this ovarian cancer case, BRCA2 and BRCA1 alone out of Panel E increased sensitivity by 2.33% over testing only the MMR genes. This translates to an observed improvement in clinical sensitivity over MMR gene testing alone of 17.9%. Thus, among cancer patients at risk for Lynch syndrome, Panel E results in a 40% increase in mutation detection over current MMR gene testing alone. Panel R and preferably Panel E (or subpanels comprising the top 2, 3, 4, 5, 6, 7, 8, 9, 10, or 11 genes thereof) can therefore be particularly useful in targeted assessment of cancer risk in patients at risk of having Lynch syndrome.

### Additional Embodiments

### Embodiment 1

[0127] A method for sequencing nucleic acids comprising: (1) isolating a plurality of nucleic acid molecules from a sample taken from a patient, each nucleic acid molecule comprising between A and B nucleotides in length, said plurality of nucleic acid molecules comprising one or more exons of a plurality of genes consisting of between W and X genes, and said plurality of genes comprising at least two genes in any of Panels A-R; and (2) determining the sequence of said plurality of nucleic acid molecules.

### Embodiment 2

[0128] A method for determining whether a patient has an increased risk of cancer, which comprises: (1) determining for a plurality of genes consisting of between W and X genes, said plurality of genes comprising at least two genes in any of Panels A-R, whether the patient has a germline deficiency in any genes in said plurality of genes; and either (2) correlating a germline deficiency in any of said plurality of genes to an increased risk of cancer, or (3) correlating the absence of a germline deficiency in all of said plurality of genes to no increased risk of cancer.

### Embodiment 3

[0129] The method of Embodiment 2 further comprising (a) isolating a plurality of nucleic acid molecules from a sample taken from a patient, each nucleic acid molecule comprising between A and B nucleotides in length, and said plurality of nucleic acid molecules comprising one or more exons of said plurality of genes and (b) determining the sequence of said plurality of nucleic acid molecules.

### Embodiment 4

[0130] The method of Embodiment 3, further comprising detecting a germline deficiency in a gene by comparing the sequence determined in (b) with one or more reference sequences.

### Embodiment 5

[0131] A method for treating a patient comprising (1) determining for a plurality of genes consisting of between W and X genes, said plurality of genes comprising at least two genes in any of Panels A-R, whether the patient has a germline deficiency in any genes in said plurality of genes; and (2)(a) correlating a germline deficiency in any of said plurality of genes to an increased risk of cancer, or (2)(b) correlating the absence of a germline deficiency in all of said plurality of genes to no increased risk of cancer; and (3) recommending, prescribing, or administering a treatment to reduce the patient's risk of cancer.

### Embodiment 6

[0132] The method of Embodiment 5, wherein said treatment comprises surgery to remove all or part of the organ in which the patient has an increased risk of cancer.

### Embodiment 7

[0133] The method of Embodiment 6, wherein said surgery is chosen from the group consisting of mastectomy, salpingo-oophorectomy, hysterectomy, colectomy, and prostatectomy.

### Embodiment 8

[0134] The method of Embodiment 5, wherein said treatment comprises preventive drug treatment.

### Embodiment 9

[0135] The method of Embodiment 8, wherein said preventive drug treatment comprises tamoxifen treatment.

### Embodiment 10

[0136] A system comprising (1) computer program for receiving, storing, and/or retrieving a patient's sequence data for a plurality of genes consisting of between W and X genes, said plurality of genes comprising at least two genes in any of Panels A-R; (2) computer program for querying this patient data; (3) optionally a computer program for comparing the patient's sequence data to one or more reference sequences to determine whether there is a mutation; (4) computer program for concluding whether there is an increased likelihood of cancer based on the presence or absence of a mutation; and optionally (4) computer program for outputting/displaying this conclusion.

### Embodiment 11

[0137] A system for sequencing genes in a sample, comprising: (1) a sample analyzer for sequencing a plurality of genes consisting of between W and X genes, said plurality of genes comprising at least two genes in any of Panels A-R, wherein the sample analyzer contains (a) the sample which is from a patient, (b) genomic DNA from the sample, (c) transcript RNA from the sample, or (d) DNA synthesized from said genomic DNA; (2) a first computer program for receiving test sequence data on the plurality of genes; and (3) a second computer program for comparing the sequence data to one or more reference sequences.

### Embodiment 12

[0138] The system of Embodiment 11, comprising a computer program for determining the patient's degree of risk of cancer based at least in part on the comparison of the test sequence with said one or more reference sequences.

### Embodiment 13

[0139] The system of Embodiment 12, wherein said computer program for determining the patient's degree of risk of cancer compares the patient's determined probability of a particular cancer with a reference probability to determine whether the patient has an increased risk of such cancer.

### Embodiment 14

[0140] A composition comprising:
[0141] (a) nucleic acid probes hybridizing to a plurality of nucleic acid molecules comprising one or more exons of a plurality of genes consisting of between W and X genes, and said plurality of genes comprising at least two genes in any of Panels A-R;
[0142] (b) nucleic acid primers and primer pairs suitable for selectively amplifying nucleic acids of (a);
[0143] (c) antibodies binding immunologically to polypeptides encoded by a plurality of genes consisting of between W and X genes, and said plurality of genes comprising at least two genes in any of Panels A-R;
[0144] (d) a probe set comprising (a), (b) and/or (c); or
[0145] (e) a microarray comprising (a), (b), (c), and/or (d).

### Embodiment 15

[0146] A kit comprising: reagents for sequencing nucleic acid molecules comprising one or more exons of a plurality of genes comprising a plurality of genes consisting of between W and X genes, said plurality of genes comprising at least two genes in any of Panels A-R; and instructions for using said reagents.

### Embodiment 16

[0147] The kit of Embodiment 15, comprising a composition of claim 14.

### Embodiment 17

[0148] The kit of Embodiment 15, wherein said reagents are PCR primers specific for the plurality of genes.

### Embodiment 18

[0149] The kit of Embodiment 15, wherein said reagents are PCR primers specific for the exons of the plurality of genes.

### Embodiment 19

[0150] The kit of Embodiment 15, wherein said reagents are oligonucleotide probes specific for the exons of the plurality of genes.

### Embodiment 20

[0151] The kit of Embodiment 15, wherein said reagents are packaged into an array.

### Embodiment 21

[0152] The method of any one of Embodiments 1, 3, or 4, comprising comparing the sequences determined in an earlier step with one or more reference sequences.

### Embodiment 22

[0153] The method of Embodiment 21, comprising correlating a difference between the determined sequences and the one or more reference sequences to a mutation in one or more of the genes in the plurality of genes.

### Embodiment 23

[0154] The method of Embodiment 21 or Embodiment 22, wherein the reference sequence for any given gene in the plurality is any of the sequences corresponding to that gene as shown in Table 3.

### Embodiment 24

[0155] The system of any one of Embodiments 10-13, comprising a computer program for determining whether the patient has a mutation in one or more of the genes in the plurality of genes by determining whether there is a difference between the determined sequences and the one or more reference sequences.

### Embodiment 25

[0156] The system of Embodiment 24, wherein the reference sequence for any given gene in the panel is any of the sequences corresponding to that gene as shown in Table 3.

### Embodiment 26

[0157] The method of any one of Embodiments 1-9, or 21-23, comprising correlating a germline deficiency in any particular gene in the plurality of genes to an increased risk of a particular cancer as shown in Table 4.

### Embodiment 27

[0158] The method of any one of Embodiments 1-9, 21-23, or 26, comprising diagnosing the patient with an increased risk of a particular cancer as shown in Table 4 based at least in part on a germline deficiency in any particular gene in the plurality of genes.

### Embodiment 28

[0159] The method of any one of Embodiments 1-9, 21-23, comprising correlating no germline deficiency in any gene in the plurality of genes with no increased risk of any cancer.

### Embodiment 29

[0160] The system of any one of Embodiments 10-13, comprising a computer program for determining the patient's degree of risk of any particular cancer as shown in Table 4 based at least in part on the comparison of the test sequence with said one or more reference sequences.

### Embodiment 30

[0161] The method of any of Embodiments 1, 3 or 4, wherein A=10, 11, 12, 13, 14, 15, 16, 17, 18, 19, 20, 25, 30, 35, 40, 45, 50, 60, 70, 80, 90, 100, 125, 150, 175, 200, 250, 300, 350, 400, 450, 500, 600, 700, 800, 900, 1,000, 1,250, 1,500, 1,750, 2,000, 2,500, 3,000, 3,500, 4,000, 5,000, 6,000, 7,000, 8,000, 9,000, 10,000, 12,000, 14,000, 16,000, 18,000, 20,000, 25,000, 30,000, 35,000, 40,000, 45,000, 50,000, 60,000, 70,000, 80,000, or 90,000, or more; and B=15, 16, 17, 18, 19, 20, 25, 30, 35, 40, 45, 50, 60, 70, 80, 90, 100, 125, 150, 175, 200, 250, 300, 350, 400, 450, 500, 600, 700, 800, 900, 1,000, 1,250, 1,500, 1,750, 2,000, 2,500, 3,000, 3,500, 4,000, 5,000, 6,000, 7,000, 8,000, 9,000, 10,000, 12,000, 14,000, 16,000, 18,000, 20,000, 25,000, 30,000, 35,000, 40,000, 45,000, 50,000, 60,000, 70,000, 80,000, 90,000, or 100,000 or more.

### Embodiment 31

[0162] The method of any of Embodiments 1, 3 or 4, wherein said plurality of DNA molecules comprises at least some length of intronic sequence adjacent to at least one of said one or more exons.

### Embodiment 32

[0163] The method of Embodiment 31, wherein said plurality of DNA molecules comprises at least 1, 2, 3, 4, 5, 6, 7, 8, 9, 10, 15, 20, 25, 30, 35, 40, 45, 50, 60, 70, 80, 90, 100, 200, 300, 400, 500 or more base pairs of the intronic sequence on one or both sides of the at least one exon.

### Embodiment 33

[0164] The method of any one of Embodiments 1-10, 21-23, 26-28, or 30-32, wherein W=2, 3, 4, 5, 6, 7, 8, 9, 10, 11, 12, 13, 14, 15, 16, 17, 18, 19, 20, 21, 22, 23, 24, 25, 26, 27, 28, 29, 30, 31, 32, 33, 34, 35, 36, 37, 38, 39, 40, 41, 42, 43, 44, 45, 46, 47, 48, 49, 50, 51, 52, 53, 54, 55, 56, 57, 58, 59, 60, 61, 62, 63, 64, 65, 66, 67, 68, or 69 or more; and X=3, 4, 5, 6, 7, 8, 9, 10, 11, 12, 13, 14, 15, 16, 17, 18, 19, 20, 25, 30, 35, 40, 45, 50, 60, 70, 80, 90, 100, 125, 150, 175, 200, 250, 300, 350, 400, 450, 500, 600, 700, 800, 900, 1,000, 1,250, 1,500, 1,750, 2,000, 2,500, 3,000, 3,500, 4,000, 5,000, 6,000, 7,000, 8,000, 9,000, 10,000, 12,000, 14,000, 16,000, 18,000, or 20,000 or more.

### Embodiment 34

[0165] The system of any one of Embodiments 10-13, 24, 25, or 29, wherein W=2, 3, 4, 5, 6, 7, 8, 9, 10, 11, 12, 13, 14, 15, 16, 17, 18, 19, 20, 21, 22, 23, 24, 25, 26, 27, 28, 29, 30, 31, 32, 33, 34, 35, 36, 37, 38, 39, 40, 41, 42, 43, 44, 45, 46, 47, 48, 49, 50, 51, 52, 53, 54, 55, 56, 57, 58, 59, 60, 61, 62, 63, 64, 65, 66, 67, 68, or 69 or more; and X=3, 4, 5, 6, 7, 8, 9, 10, 11, 12, 13, 14, 15, 16, 17, 18, 19, 20, 25, 30, 35, 40, 45, 50, 60, 70, 80, 90, 100, 125, 150, 175, 200, 250, 300, 350, 400, 450, 500, 600, 700, 800, 900, 1,000, 1,250, 1,500, 1,750, 2,000, 2,500, 3,000, 3,500, 4,000, 5,000, 6,000, 7,000, 8,000, 9,000, 10,000, 12,000, 14,000, 16,000, 18,000, or 20,000 or more.

### Embodiment 35

[0166] The method of any one of Embodiments 1-10, 21-23, 26-28, or 30-33, wherein said plurality of genes comprises at least 2, 3, 4, 5, 6, 7, 8, 9, 10, 11, 12, 13, 14, 15, 16, 17, 18, 19, 20, 21, 22, 23, 24, 25, 26, 27, 28, 29, 30, 31, 32, 33, 34, 35, 36, 37, 38, 39, 40, 41, 42, 43, 44, 45, 46, 47, 48, 49, 50, 51, 52, 53, 54, 55, 56, 57, 58, 59, 60, 61, 62, 63, 64, 65, 66, 67, 68, or 69 genes listed in any of Panels A-R.

### Embodiment 36

[0167] The system of any one of Embodiments 10-13, 24, 25, 29, or 34, wherein said plurality of genes comprises at least 2, 3, 4, 5, 6, 7, 8, 9, 10, 11, 12, 13, 14, 15, 16, 17, 18, 19, 20, 21, 22, 23, 24, 25, 26, 27, 28, 29, 30, 31, 32, 33, 34, 35, 36, 37, 38, 39, 40, 41, 42, 43, 44, 45, 46, 47, 48, 49, 50, 51, 52, 53, 54, 55, 56, 57, 58, 59, 60, 61, 62, 63, 64, 65, 66, 67, 68, or 69 genes listed in any of Panels A-R.

### Embodiment 37

[0168] The method of any one of Embodiments 1-10, 21-23, 26-28, 30-33, or 35, wherein the plurality of genes comprises gene numbers between Y and Z of any of Panels A-R and Y=1, 2, 3, 4, 5, 6, 7, 8, 9, 10, 11, 12, 13, 14, 15, 16, 17, 18, 19, 20, 21, 22, 23, 24, 25, 26, 27, 28, 29, 30, 31, 32, 33, 34, 35, 36, 37, 38, 39, 40, 41, 42, 43, 44, 45, 46, 47, 48, 49, 50, 51, 52, 53, 54, 55, 56, 57, 58, 59, 60, 61, 62, 63, 64, 65, 66, 67 or 68 and Z=2, 3, 4, 5, 6, 7, 8, 9, 10, 11, 12, 13, 14, 15, 16, 17, 18, 19, 20, 21, 22, 23, 24, 25, 26, 27, 28, 29, 30, 31, 32, 33, 34, 35, 36, 37, 38, 39, 40, 41, 42, 43, 44, 45, 46, 47, 48, 49, 50, 51, 52, 53, 54, 55, 56, 57, 58, 59, 60, 61, 62, 63, 64, 65, 66, 67, 68, or 69.

### Embodiment 38

[0169] The method of any one of Embodiments 1-10, 21-23, 26-28, 30-33, 35, or 37, wherein said plurality of genes comprises gene numbers 1 & 2, 2 & 3, 3 & 4, 4 & 5, 5 & 6, 6 & 7, 7 & 8, 8 & 9, 9 & 10, 10 & 11, 11 & 12, 12 & 13, 13 & 14, 14 & 15, 15 & 16, 16 & 17, 17 & 18, 18 & 19, 19 & 20, 20 & 21, 21 & 22, 22 & 23, 23 & 24, 24 & 25, 25 & 26, 26 & 27, 27 & 28, 28 & 29, 29 & 30, 30 & 31, 31 & 32, 32 & 33, 33 & 34, 34 & 35, 35 & 36, 36 & 37, 37& 38, 38& 39, 39& 40, 40& 41, 41& 42, 42& 43, 43& 44, 44& 45, 45& 46, 46& 47, 47& 48, 48 & 49, 49 & 50, 50 & 51, 51 & 52, 52 & 53, 53 & 54, 54 & 55, 55 & 56, 56 & 57, 57 & 58, 58 & 59, 59 & 60, 60 & 61, 61 & 62, 62 & 63, 63 & 64, 64 & 65, 65 & 66, 66 & 67, 67 & 68, or 68 & 69 of any of Panels A-R.

### Embodiment 39

[0170] The method of any one of Embodiments 1-10, 21-23, 26-28, 30-33, 35, or 37-38, wherein the genes chosen from Panels A-R comprise at least 1%, 2%, 3%, 4%, 5%, 6%, 7%, 8%, 9%, 10%, 11%, 12%, 13%, 14%, 15%, 16%, 17%, 18%, 19%, 20%, 25%, 30%, 35%, 40%, 45%, 50%, 60%, 70%, 80%, 90%, 91%, 92%, 93%, 94%, 95%, 96%, 97%, 98%, 99%, or 100%, of the plurality of genes to be analyzed.

### Embodiment 40

[0171] The system of any one of Embodiments 10-13, 24, 25, 29, 34, or 36, wherein said plurality of genes comprises at least 2, 3, 4, 5, 6, 7, 8, 9, 10, 11, 12, 13, 14, 15, 16, 17, 18, 19, 20, 21, 22, 23, 24, 25, 26, 27, 28, 29, 30, 31, 32, 33, 34, 35, 36, 37, 38, 39, 40, 41, 42, 43, 44, 45, 46, 47, 48, 49, 50, 51, 52, 53, 54, 55, 56, 57, 58, 59, 60, 61, 62, 63, 64, 65, 66, 67, 68, or 69 genes listed in any of Panels A-R.

### Embodiment 41

[0172] The system of any one of Embodiments 10-13, 24, 25, 29, 34, 36, or 40, wherein the plurality of genes comprises gene numbers between Y and Z of any of Panels A-R and Y=1, 2, 3, 4, 5, 6, 7, 8, 9, 10, 11, 12, 13, 14, 15, 16, 17, 18, 19, 20, 21, 22, 23, 24, 25, 26, 27, 28, 29, 30, 31, 32, 33, 34, 35, 36, 37, 38, 39, 40, 41, 42, 43, 44, 45, 46, 47, 48, 49, 50, 51, 52, 53, 54, 55, 56, 57, 58, 59, 60, 61, 62, 63, 64, 65, 66, 67 or 68 and Z=2, 3, 4, 5, 6, 7, 8, 9, 10, 11, 12, 13, 14, 15, 16, 17, 18, 19, 20, 21, 22, 23, 24, 25, 26, 27, 28, 29, 30, 31, 32, 33, 34, 35, 36, 37, 38, 39, 40, 41, 42, 43, 44, 45, 46, 47, 48, 49, 50, 51, 52, 53, 54, 55, 56, 57, 58, 59, 60, 61, 62, 63, 64, 65, 66, 67, 68, or 69.

### Embodiment 42

[0173] The system of any one of Embodiments 10-13, 24, 25, 29, 34, 36, or 40-41, wherein said plurality of genes comprises gene numbers 1 & 2, 2 & 3, 3 & 4, 4 & 5, 5 & 6, 6 & 7, 7 & 8, 8 & 9, 9 & 10, 10 & 11, 11 & 12, 12 & 13, 13 & 14, 14 & 15, 15 & 16, 16 & 17, 17 & 18, 18 & 19, 19 & 20, 20 & 21, 21 & 22, 22 & 23, 23 & 24, 24 & 25, 25 & 26, 26 & 27, 27& 28, 28& 29, 29& 30, 30& 31, 31& 32, 32& 33, 33& 34, 34& 35, 35& 36, 36& 37, 37& 38, 38& 39, 39& 40, 40& 41, 41& 42, 42& 43, 43& 44, 44& 45, 45& 46, 46& 47, 47& 48, 48 & 49, 49 & 50, 50 & 51, 51 & 52, 52 & 53, 53 & 54, 54 & 55, 55 & 56, 56 & 57, 57 & 58, 58 & 59, 59 & 60, 60 & 61, 61 & 62, 62 & 63, 63 & 64, 64 & 65, 65 & 66, 66 & 67, 67 & 68, or 68 & 69 of any of Panels A-R.

### Embodiment 43

[0174] The system of any one of Embodiments 10-13, 24, 25, 29, 34, 36, or 40-42, wherein the genes chosen from Panels A-R comprise at least 1%, 2%, 3%, 4%, 5%, 6%, 7%, 8%, 9%, 10%, 11%, 12%, 13%, 14%, 15%, 16%, 17%, 18%, 19%, 20%, 25%, 30%, 35%, 40%, 45%, 50%, 60%, 70%, 80%, 90%, 91%, 92%, 93%, 94%, 95%, 96%, 97%, 98%, 99%, or 100%, of the plurality of genes to be analyzed.

[0175] All publications and patent applications mentioned in the specification are indicative of the level of those skilled in the art to which this disclosure pertains. All publications and patent applications are herein incorporated by reference to the same extent as if each individual publication or patent application was specifically and individually indicated to be incorporated by reference. The mere mentioning of the publications and patent applications does not necessarily constitute an admission that they are prior art to the instant application.

[0176] Although the foregoing disclosure has been described in some detail by way of illustration and example for purposes of clarity of understanding, it will be obvious that certain changes and modifications may be practiced within the scope of the appended claims.

The application's sequence listing, which the Patent Office published only in electronic form, follows.

SEQUENCE LISTING (716 sequences)

SEQ ID NO: 1 - DNA, 10814 bp, Homo sapiens
agtcttcccacctcccacaagatggcggagggcaagtagcaagggggcggggtgtggccgccggaagcctagccgctgctcgggggggacctgcgggctcaggcccgggagctgcggaccgaggttggctcgatgctgttcccaggtactgttgttggctgttggtgaggaaggtgaagcactcagttgccttctcgggcctcggcgccccctatgtacgcctccctgggctcgggtccggtcgcccctttgcccgcttctgtaccaccctcagttctcgggtcctggagcaccggcggcagcaggagctgcgtccggcaggagacgaagagcccgggcggcgctcgtacttctggccactgggcgagcgtctggcaggaagtacttaaacaactacaaggaagtattgaagatgaagctatggcttcttctggacagattgatttattagagcgtcttaaagagcttaacttagatagcagtaatttccctggagtaaaactgcggtcaaaaatgtccctccgttcttatggaagccgggaaggatctgtatcaagccgttctggagagtgcagtcctgttcctatgggttcatttccaagaagagggtttgtaaatggaagcagagaaagtactggatatttagaagaacttgagaaagagaggtcattgcttcttgctgatcttgacaaagaagaaaaggaaaaagactggtattacgctcaacttcagaatctcactaaaagaatagatagtcttcctttaactgaaaatttttccttacaaacagatatgaccagaaggcaattggaatatgaagcaaggcaaatcagagttgcgatggaagaacaactaggtacctgccaggatatggaaaaacgagcacagaggtcatctcagaacaagcatgaaaccggctcacatgatgctgagcggcagaatgaaggtcaaggagtgggagaaatcaacatggcaacttctggtaatggtcagggttcaactacacgaatggaccatgaaacagccagtgttttgagttctagtagcacacactctgcacctcgaaggctgacaagtcatctgggaaccaaggtggaaatggtgtattcattgttgtcaatgcttggtactcatgataaggatgatatgtcgcgaactttgctagctatgtctagctcccaagacagctgtatatccatgcgacagtctggatgtcttcctctcctcatccagcttttacatggcaatgacaaagactctgtattgttgggaaattcccggggcagtaaagaggctcgggccagggccagtgcagcactccacaacatcattcactcacagcctgatgacaagagaggcaggcgtgaaatccgagtccttcatcttttggaacagatacgcgcttactgtgaaacctgttgggagtggcaggaagctcatgaaccaggcatggaccaggacaaaaatccaatgccagctcctgttgaacatcagatctgtcctgctgtgtgtgttctaatgaaactttcatttgatgaagagcatagacatgcaatgaatgaactagggggactacaggccattgcagaattattgcaagtggactgtgaaatgtatgggcttactaatgaccactacagtattacactaagacgatatgctggaatggctttgacaaacttgacttttggagatgtagccaacaaggctacgctatgctctatgaaaggctgcatgagagcacttgtggcccaactaaaatctgaaagtgaagacttacagcaggttattgcgagtgttttgaggaatttgtcttggcgagcagatgtaaatagtaaaaagacgttgcgagaagttggaagtgtgaaagcattgatggaatgtgctttagaagttaaaaaggaatcaaccctcaaaagcgtattgagtgccttatggaatttgtcagcacattgcactgagaataaagctgatatatgtgctgtagatggtgcacttgcatttttggttggcactcttacttaccggagccagacaaacactttagccattattgaaagtggaggtgggatattacggaatgtgtccagcttgatagctacaaatgaggaccacaggcaaatcctaagagagaacaactgtctacaaactttattacaacacttaaaatctcatagtttgacaatagtcagtaatgcatgtggaactttgtggaatctctcagcaagaaatcctaaagaccaggaagcattatgggacatgggggcagttagcatgctcaagaacctcattcattcaaagcacaaaatgattgctatgggaagtgctgcagctttaaggaatctcatggcaaataggcctgcgaagtacaaggatgccaatattatgtctcctggctcaagcttgccatctcttcatgttaggaaacaaaaagccctagaagcagaattagatgctcagcacttatcagaaacttttgacaatatagacaatttaagtcccaaggcatctcatcgtagtaagcagagacacaagcaaagtctctatggtgattatgtttttgacaccaatcgacatgatgataataggtcagacaattttaatactggcaacatgactgtcctttcaccatatttgaatactacagtgttacccagctcctcttcatcaagaggaagcttagatagttctcgttctgaaaaagatagaagtttggagagagaacgcggaattggtctaggcaactaccatccagcaacagaaaatccaggaacttcttcaaagcgaggtttgcagatctccaccactgcagcccagattgccaaagtcatggaagaagtgtcagccattcatacctctcaggaagacagaagttctgggtctaccactgaattacattgtgtgacagatgagagaaatgcacttagaagaagctctgctgcccatacacattcaaacacttacaatttcactaagtcggaaaattcaaataggacatgttctatgccttatgccaaattagaatacaagagatcttcaaatgatagtttaaatagtgtcagtagtagtgatggttatggtaaaagaggtcaaatgaaaccctcgattgaatcctattctgaagatgatgaaagtaagttttgcagttatggtcaatacccagccgacctagcccataaaatacatagtgcaaatcatatggatgataatgatggagaactagatacaccaataaattatagtcttaaatattcagatgagcagttgaactctggaaggcaaagtccttcacagaatgaaagatgggcaagacccaaacacataatagaagatgaaataaaacaaagtgagcaaagacaatcaaggaatcaaagtacaacttatcctgtttatactgagagcactgatgataaacacctcaagttccaaccacattttggacagcaggaatgtgtttctccatacaggtcacggggagccaatggttcagaaacaaatcgagtgggttctaatcatggaattaatcaaaatgtaagccagtctttgtgtcaagaagatgactatgaagatgataagcctaccaattatagtgaacgttactctgaagaagaacagcatgaagaagaagagagaccaacaaattatagcataaaatataatgaagagaaacgtcatgtggatcagcctattgattatagtttaaaatatgccacagatattccttcatcacagaaacagtcattttcattctcaaagagttcatctggacaaagcagtaaaaccgaacatatgtcttcaagcagtgagaatacgtccacaccttcatctaatgccaagaggcagaatcagctccatccaagttctgcacagagtagaagtggtcagcctcaaaaggctgccacttgcaaagtttcttctattaaccaagaaacaatacagacttattgtgtagaagatactccaatatgtttttcaagatgtagttcattatcatctttgtcatcagctgaagatgaaataggatgtaatcagacgacacaggaagcagattctgctaataccctgcaaatagcagaaataaaagaaaagattggaactaggtcagctgaagatcctgtgagcgaagttccagcagtgtcacagcaccctagaaccaaatccagcagactgcagggttctagtttatcttcagaatcagccaggcacaaagctgttgaattttcttcaggagcgaaatctccctccaaaagtggtgctcagacacccaaaagtccacctgaacactatgttcaggagaccccactcatgtttagcagatgtacttctgtcagttcacttgatagttttgagagtcgttcgattgccagctccgttcagagtgaaccatgcagtggaatggtaagtggcattataagccccagtgatcttccagatagccctggacaaaccatgccaccaagcagaagtaaaacacctccaccacctcctcaaacagctcaaaccaagcgagaagtacctaaaaataaagcacctactgctgaaaagagagagagtggacctaagcaagctgcagtaaatgctgcagttcagagggtccaggttcttccagatgctgatactttattacattttgccacggaaagtactccagatggattttcttgttcatccagcctgagtgctctgagcctcgatgagccatttatacagaaagatgtggaattaagaataatgcctccagttcaggaaaatgacaatgggaatgaaacagaatcagagcagcctaaagaatcaaatgaaaaccaagagaaagaggcagaaaaaactattgattctgaaaaggacctattagatgattcagatgatgatgatattgaaatactagaagaatgtattatttctgccatgccaacaaagtcatcacgtaaagcaaaaaagccagcccagactgcttcaaaattacctccacctgtggcaaggaaaccaagtcagctgcctgtgtacaaacttctaccatcacaaaacaggttgcaaccccaaaagcatgttagttttacaccgggggatgatatgccacgggtgtattgtgttgaagggacacctataaacttttccacagctacatctctaagtgatctaacaatcgaatcccctccaaatgagttagctgctggagaaggagttagaggaggggcacagtcaggtgaatttgaaaaacgagataccattcctacagaaggcagaagtacagatgaggctcaaggaggaaaaacctcatctgtaaccatacctgaattggatgacaataaagcagaggaaggtgatattcttgcagaatgcattaattctgctatgcccaaagggaaaagtcacaagcctttccgtgtgaaaaagataatggaccaggtccagcaagcatctgcgtcttcttctgcacccaacaaaaatcagttagatggtaagaaaaagaaaccaacttcaccagtaaaacctataccacaaaatactgaatataggacacgtgtaagaaaaaatgcagactcaaaaaataatttaaatgctgagagagttttctcagacaacaaagattcaaagaaacagaatttgaaaaataattccaaggtcttcaatgataagctcccaaataatgaagatagagtcagaggaagttttgcttttgattcacctcatcattacacgcctattgaaggaactccttactgtttttcacgaaatgattctttgagttctctagattttgatgatgatgatgttgacctttccagggaaaaggctgaattaagaaaggcaaaagaaaataaggaatcagaggctaaagttaccagccacacagaactaacctccaaccaacaatcagctaataagacacaagctattgcaaagcagccaataaatcgaggtcagcctaaacccatacttcagaaacaatccacttttccccagtcatccaaagacataccagacagaggggcagcaactgatgaaaagttacagaattttgctattgaaaatactccggtttgcttttctcataattcctctctgagttctctcagtgacattgaccaagaaaacaacaataaagaaaatgaacctatcaaagagactgagccccctgactcacagggagaaccaagtaaacctcaagcatcaggctatgctcctaaatcatttcatgttgaagataccccagtttgtttctcaagaaacagttctctcagttctcttagtattgactctgaagatgacctgttgcaggaatgtataagctccgcaatgccaaaaaagaaaaagccttcaagactcaagggtgataatgaaaaacatagtcccagaaatatgggtggcatattaggtgaagatctgacacttgatttgaaagatatacagagaccagattcagaacatggtctatcccctgattcagaaaattttgattggaaagctattcaggaaggtgcaaattccatagtaagtagtttacatcaagctgctgctgctgcatgtttatctagacaagcttcgtctgattcagattccatcctttccctgaaatcaggaatctctctgggatcaccatttcatcttacacctgatcaagaagaaaaaccctttacaagtaataaaggcccacgaattctaaaaccaggggagaaaagtacattggaaactaaaaagatagaatctgaaagtaaaggaatcaaaggaggaaaaaaagtttataaaagtttgattactggaaaagttcgatctaattcagaaatttcaggccaaatgaaacagccccttcaagcaaacatgccttcaatctctcgaggcaggacaatgattcatattccaggagttcgaaatagctcctcaagtacaagtcctgtttctaaaaaaggcccaccccttaagactccagcctccaaaagccctagtgaaggtcaaacagccaccacttctcctagaggagccaagccatctgtgaaatcagaattaagccctgttgccaggcagacatcccaaataggtgggtcaagtaaagcaccttctagatcaggatctagagattcgaccccttcaagacctgcccagcaaccattaagtagacctatacagtctcctggccgaaactcaatttcccctggtagaaatggaataagtcctcctaacaaattatctcaacttccaaggacatcatcccctagtactgcttcaactaagtcctcaggttctggaaaaatgtcatatacatctccaggtagacagatgagccaacagaaccttaccaaacaaacaggtttatccaagaatgccagtagtattccaagaagtgagtctgcctccaaaggactaaatcagatgaataatggtaatggagccaataaaaaggtagaactttctagaatgtcttcaactaaatcaagtggaagtgaatctgatagatcagaaagacctgtattagtacgccagtcaactttcatcaaagaagctccaagcccaaccttaagaagaaaattggaggaatctgcttcatttgaatctctttctccatcatctagaccagcttctcccactaggtcccaggcacaaactccagttttaagtccttcccttcctgatatgtctctatccacacattcgtctgttcaggctggtggatggcgaaaactcccacctaatctcagtcccactatagagtataatgatggaagaccagcaaagcgccatgatattgcacggtctcattctgaaagtccttctagacttccaatcaataggtcaggaacctggaaacgtgagcacagcaaacattcatcatcccttcctcgagtaagcacttggagaagaactggaagttcatcttcaattctttctgcttcatcagaatccagtgaaaaagcaaaaagtgaggatgaaaaacatgtgaactctatttcaggaaccaaacaaagtaaagaaaaccaagtatccgcaaaaggaacatggagaaaaataaaagaaaatgaattttctcccacaaatagtacttctcagaccgtttcctcaggtgctacaaatggtgctgaatcaaagactctaatttatcaaatggcacctgctgtttctaaaacagaggatgtttgggtgagaattgaggactgtcccattaacaatcctagatctggaagatctcccacaggtaatactcccccggtgattgacagtgtttcagaaaaggcaaatccaaacattaaagattcaaaagataatcaggcaaaacaaaatgtgggtaatggcagtgttcccatgcgtaccgtgggtttggaaaatcgcctgaactcctttattcaggtggatgcccctgaccaaaaaggaactgagataaaaccaggacaaaataatcctgtccctgtatcagagactaatgaaagttctatagtggaacgtaccccattcagttctagcagctcaagcaaacacagttcacctagtgggactgttgctgccagagtgactccttttaattacaacccaagccctaggaaaagcagcgcagatagcacttcagctcggccatctcagatcccaactccagtgaataacaacacaaagaagcgagattccaaaactgacagcacagaatccagtggaacccaaagtcctaagcgccattctgggtcttaccttgtgacatctgtttaaaagagaggaagaatgaaactaagaaaattctatgttaattacaactgctatatagacattttgtttcaaatgaaactttaaaagactgaaaaattttgtaaataggtttgattcttgttagagggtttttgttctggaagccatatttgatagtatactttgtcttcactggtcttattttgggaggcactcttgatggttaggaaaaaaatagtaaagccaagtatgtttgtacagtatgttttacatgtatttaaagtagcatcccatcccaacttcctttaattattgcttgtcttaaaataatgaacactacagatagaaaatatgatatattgctgttatcaatcatttctagattataaactgactaaacttacatcagggaaaaattggtatttatgcaaaaaaaaatgtttttgtccttgtgagtccatctaacatcataattaatcatgtggctgtgaaattcacagtaatatggttcccgatgaacaagtttacccagcctgctttgctttactgcatgaatgaaactgatggttcaatttcagaagtaatgattaacagttatgtggtcacatgatgtgcatagagatagctacagtgtaataatttacactattttgtgctccaaacaaaacaaaaatctgtgtaactgtaaaacattgaatgaaactattttacctgaactagattttatctgaaagtaggtagaatttttgctatgctgtaatttgttgtatattctggtatttgaggtgagatggctgctcttttattaatgagacatgaattgtgtctcaacagaaactaaatgaacatttcagaataaattattgctgtatgtaaactgttactgaaattggtatttgtttgaagggtcttgtttcacatttgtattaataattgtttaaaatgcctcttttaaaagcttatataaatttttttcttcagcttctatgcattaagagtaaaattcctcttactgtaataaaaacaattgaagaagactgttgccacttaaccattccatgcgttggcacttatctattcctgaaatttcttttatgtgattagctcatcttgatttttaatatttttccacttaaacttttttttcttactccactggagctcagtaaaagtaaattcatgtaatagcaatgcaagcagcctagcacagactaagcattgagcataataggcccacataatttcctctttcttaatattatagaattctgtacttgaaattgattcttagacattgcagtctcttcgaggctttacagtgtaaactgtcttgccccttcatcttcttgttgcaactgggtctgacatgaacactttttatcaccctgtatgttagggcaagatctcagcagtgaagtataatcagcactttgccatgctcagaaaattcaaatcacatggaactttagaggtagatttaatacgattaagatattcagaagtatattttagaatccctgcctgttaaggaaactttatttgtggtaggtacagttctggggtacatgttaagtgtccccttatacagtggagggaagtcttccttcctgaaggaaaataaactgacacttattaactaagataatttacttaatatatcttccctgatttgttttaaaagatcagagggtgactgatgatacatgcatacatatttgttgaataaatgaaaatttatttttagtgataagattcatacactctgtatttggggagggaaaacctttttaagcatggtggggcactcagataggagtgaatacacctacctggtgccttgaaaatcacatcaagtagttaattatctaccccttacctgtgtttataacttccaggtaatgagaatgattttttttaaagctaaaatgccagtaaataaaagtgctatgacttgagctaagatatttgactccaatgcctgtactgtgtctactgcaccactttgtaaacacttcaatttactatctttgaaatgattgacctttaaatttttgccaaatgttatctgaaattgtctatgaataccatctacttctgttgttttcccaggcttccataaacaatggagatacatgcaaaaaaaaaaa

SEQ ID NO: 2 - DNA, 10848 bp, Homo sapiens
gtattggtgcagcccgccagggtgtcactggagacagaatggaggtgctgccggactcggaaatggggacacatgcattggtggccaaaagagagaggagacaaaaccgctgcagatggctgatgtgaatctagtggaaagagctactggggatgagagaaagaggaggaggcaggtccaagggtagccaaggatggctgcagcttcatatgatcagttgttaaagcaagttgaggcactgaagatggagaactcaaatcttcgacaagagctagaagataattccaatcatcttacaaaactggaaactgaggcatctaatatgaaggaagtacttaaacaactacaaggaagtattgaagatgaagctatggcttcttctggacagattgatttattagagcgtcttaaagagcttaacttagatagcagtaatttccctggagtaaaactgcggtcaaaaatgtccctccgttcttatggaagccgggaaggatctgtatcaagccgttctggagagtgcagtcctgttcctatgggttcatttccaagaagagggtttgtaaatggaagcagagaaagtactggatatttagaagaacttgagaaagagaggtcattgcttcttgctgatcttgacaaagaagaaaaggaaaaagactggtattacgctcaacttcagaatctcactaaaagaatagatagtcttcctttaactgaaaatttttccttacaaacagatatgaccagaaggcaattggaatatgaagcaaggcaaatcagagttgcgatggaagaacaactaggtacctgccaggatatggaaaaacgagcacagcgaagaatagccagaattcagcaaatcgaaaaggacatacttcgtatacgacagcttttacagtcccaagcaacagaagcagagaggtcatctcagaacaagcatgaaaccggctcacatgatgctgagcggcagaatgaaggtcaaggagtgggagaaatcaacatggcaacttctggtaatggtcagggttcaactacacgaatggaccatgaaacagccagtgttttgagttctagtagcacacactctgcacctcgaaggctgacaagtcatctgggaaccaaggtggaaatggtgtattcattgttgtcaatgcttggtactcatgataaggatgatatgtcgcgaactttgctagctatgtctagctcccaagacagctgtatatccatgcgacagtctggatgtcttcctctcctcatccagcttttacatggcaatgacaaagactctgtattgttgggaaattcccggggcagtaaagaggctcgggccagggccagtgcagcactccacaacatcattcactcacagcctgatgacaagagaggcaggcgtgaaatccgagtccttcatcttttggaacagatacgcgcttactgtgaaacctgttgggagtggcaggaagctcatgaaccaggcatggaccaggacaaaaatccaatgccagctcctgttgaacatcagatctgtcctgctgtgtgtgttctaatgaaactttcatttgatgaagagcatagacatgcaatgaatgaactagggggactacaggccattgcagaattattgcaagtggactgtgaaatgtatgggcttactaatgaccactacagtattacactaagacgatatgctggaatggctttgacaaacttgacttttggagatgtagccaacaaggctacgctatgctctatgaaaggctgcatgagagcacttgtggcccaactaaaatctgaaagtgaagacttacagcaggttattgcgagtgttttgaggaatttgtcttggcgagcagatgtaaatagtaaaaagacgttgcgagaagttggaagtgtgaaagcattgatggaatgtgctttagaagttaaaaaggaatcaaccctcaaaagcgtattgagtgccttatggaatttgtcagcacattgcactgagaataaagctgatatatgtgctgtagatggtgcacttgcatttttggttggcactcttacttaccggagccagacaaacactttagccattattgaaagtggaggtgggatattacggaatgtgtccagcttgatagctacaaatgaggaccacaggcaaatcctaagagagaacaactgtctacaaactttattacaacacttaaaatctcatagtttgacaatagtcagtaatgcatgtggaactttgtggaatctctcagcaagaaatcctaaagaccaggaagcattatgggacatgggggcagttagcatgctcaagaacctcattcattcaaagcacaaaatgattgctatgggaagtgctgcagctttaaggaatctcatggcaaataggcctgcgaagtacaaggatgccaatattatgtctcctggctcaagcttgccatctcttcatgttaggaaacaaaaagccctagaagcagaattagatgctcagcacttatcagaaacttttgacaatatagacaatttaagtcccaaggcatctcatcgtagtaagcagagacacaagcaaagtctctatggtgattatgtttttgacaccaatcgacatgatgataataggtcagacaattttaatactggcaacatgactgtcctttcaccatatttgaatactacagtgttacccagctcctcttcatcaagaggaagcttagatagttctcgttctgaaaaagatagaagtttggagagagaacgcggaattggtctaggcaactaccatccagcaacagaaaatccaggaacttcttcaaagcgaggtttgcagatctccaccactgcagcccagattgccaaagtcatggaagaagtgtcagccattcatacctctcaggaagacagaagttctgggtctaccactgaattacattgtgtgacagatgagagaaatgcacttagaagaagctctgctgcccatacacattcaaacacttacaatttcactaagtcggaaaattcaaataggacatgttctatgccttatgccaaattagaatacaagagatcttcaaatgatagtttaaatagtgtcagtagtagtgatggttatggtaaaagaggtcaaatgaaaccctcgattgaatcctattctgaagatgatgaaagtaagttttgcagttatggtcaatacccagccgacctagcccataaaatacatagtgcaaatcatatggatgataatgatggagaactagatacaccaataaattatagtcttaaatattcagatgagcagttgaactctggaaggcaaagtccttcacagaatgaaagatgggcaagacccaaacacataatagaagatgaaataaaacaaagtgagcaaagacaatcaaggaatcaaagtacaacttatcctgtttatactgagagcactgatgataaacacctcaagttccaaccacattttggacagcaggaatgtgtttctccatacaggtcacggggagccaatggttcagaaacaaatcgagtgggttctaatcatggaattaatcaaaatgtaagccagtctttgtgtcaagaagatgactatgaagatgataagcctaccaattatagtgaacgttactctgaagaagaacagcatgaagaagaagagagaccaacaaattatagcataaaatataatgaagagaaacgtcatgtggatcagcctattgattatagtttaaaatatgccacagatattccttcatcacagaaacagtcattttcattctcaaagagttcatctggacaaagcagtaaaaccgaacatatgtcttcaagcagtgagaatacgtccacaccttcatctaatgccaagaggcagaatcagctccatccaagttctgcacagagtagaagtggtcagcctcaaaaggctgccacttgcaaagtttcttctattaaccaagaaacaatacagacttattgtgtagaagatactccaatatgtttttcaagatgtagttcattatcatctttgtcatcagctgaagatgaaataggatgtaatcagacgacacaggaagcagattctgctaataccctgcaaatagcagaaataaaagaaaagattggaactaggtcagctgaagatcctgtgagcgaagttccagcagtgtcacagcaccctagaaccaaatccagcagactgcagggttctagtttatcttcagaatcagccaggcacaaagctgttgaattttcttcaggagcgaaatctccctccaaaagtggtgctcagacacccaaaagtccacctgaacactatgttcaggagaccccactcatgtttagcagatgtacttctgtcagttcacttgatagttttgagagtcgttcgattgccagctccgttcagagtgaaccatgcagtggaatggtaagtggcattataagccccagtgatcttccagatagccctggacaaaccatgccaccaagcagaagtaaaacacctccaccacctcctcaaacagctcaaaccaagcgagaagtacctaaaaataaagcacctactgctgaaaagagagagagtggacctaagcaagctgcagtaaatgctgcagttcagagggtccaggttcttccagatgctgatactttattacattttgccacggaaagtactccagatggattttcttgttcatccagcctgagtgctctgagcctcgatgagccatttatacagaaagatgtggaattaagaataatgcctccagttcaggaaaatgacaatgggaatgaaacagaatcagagcagcctaaagaatcaaatgaaaaccaagagaaagaggcagaaaaaactattgattctgaaaaggacctattagatgattcagatgatgatgatattgaaatactagaagaatgtattatttctgccatgccaacaaagtcatcacgtaaagcaaaaaagccagcccagactgcttcaaaattacctccacctgtggcaaggaaaccaagtcagctgcctgtgtacaaacttctaccatcacaaaacaggttgcaaccccaaaagcatgttagttttacaccgggggatgatatgccacgggtgtattgtgttgaagggacacctataaacttttccacagctacatctctaagtgatctaacaatcgaatcccctccaaatgagttagctgctggagaaggagttagaggaggggcacagtcaggtgaatttgaaaaacgagataccattcctacagaaggcagaagtacagatgaggctcaaggaggaaaaacctcatctgtaaccatacctgaattggatgacaataaagcagaggaaggtgatattcttgcagaatgcattaattctgctatgcccaaagggaaaagtcacaagcctttccgtgtgaaaaagataatggaccaggtccagcaagcatctgcgtcttcttctgcacccaacaaaaatcagttagatggtaagaaaaagaaaccaacttcaccagtaaaacctataccacaaaatactgaatataggacacgtgtaagaaaaaatgcagactcaaaaaataatttaaatgctgagagagttttctcagacaacaaagattcaaagaaacagaatttgaaaaataattccaaggtcttcaatgataagctcccaaataatgaagatagagtcagaggaagttttgcttttgattcacctcatcattacacgcctattgaaggaactccttactgtttttcacgaaatgattctttgagttctctagattttgatgatgatgatgttgacctttccagggaaaaggctgaattaagaaaggcaaaagaaaataaggaatcagaggctaaagttaccagccacacagaactaacctccaaccaacaatcagctaataagacacaagctattgcaaagcagccaataaatcgaggtcagcctaaacccatacttcagaaacaatccacttttccccagtcatccaaagacataccagacagaggggcagcaactgatgaaaagttacagaattttgctattgaaaatactccggtttgcttttctcataattcctctctgagttctctcagtgacattgaccaagaaaacaacaataaagaaaatgaacctatcaaagagactgagccccctgactcacagggagaaccaagtaaacctcaagcatcaggctatgctcctaaatcatttcatgttgaagataccccagtttgtttctcaagaaacagttctctcagttctcttagtattgactctgaagatgacctgttgcaggaatgtataagctccgcaatgccaaaaaagaaaaagccttcaagactcaagggtgataatgaaaaacatagtcccagaaatatgggtggcatattaggtgaagatctgacacttgatttgaaagatatacagagaccagattcagaacatggtctatcccctgattcagaaaattttgattggaaagctattcaggaaggtgcaaattccatagtaagtagtttacatcaagctgctgctgctgcatgtttatctagacaagcttcgtctgattcagattccatcctttccctgaaatcaggaatctctctgggatcaccatttcatcttacacctgatcaagaagaaaaaccctttacaagtaataaaggcccacgaattctaaaaccaggggagaaaagtacattggaaactaaaaagatagaatctgaaagtaaaggaatcaaaggaggaaaaaaagtttataaaagtttgattactggaaaagttcgatctaattcagaaatttcaggccaaatgaaacagccccttcaagcaaacatgccttcaatctctcgaggcaggacaatgattcatattccaggagttcgaaatagctcctcaagtacaagtcctgtttctaaaaaaggcccaccccttaagactccagcctccaaaagccctagtgaaggtcaaacagccaccacttctcctagaggagccaagccatctgtgaaatcagaattaagccctgttgccaggcagacatcccaaataggtgggtcaagtaaagcaccttctagatcaggatctagagattcgaccccttcaagacctgcccagcaaccattaagtagacctatacagtctcctggccgaaactcaatttcccctggtagaaatggaataagtcctcctaacaaattatctcaacttccaaggacatcatcccctagtactgcttcaactaagtcctcaggttctggaaaaatgtcatatacatctccaggtagacagatgagccaacagaaccttaccaaacaaacaggtttatccaagaatgccagtagtattccaagaagtgagtctgcctccaaaggactaaatcagatgaataatggtaatggagccaataaaaaggtagaactttctagaatgtcttcaactaaatcaagtggaagtgaatctgatagatcagaaagacctgtattagtacgccagtcaactttcatcaaagaagctccaagcccaaccttaagaagaaaattggaggaatctgcttcatttgaatctctttctccatcatctagaccagcttctcccactaggtcccaggcacaaactccagttttaagtccttcccttcctgatatgtctctatccacacattcgtctgttcaggctggtggatggcgaaaactcccacctaatctcagtcccactatagagtataatgatggaagaccagcaaagcgccatgatattgcacggtctcattctgaaagtccttctagacttccaatcaataggtcaggaacctggaaacgtgagcacagcaaacattcatcatcccttcctcgagtaagcacttggagaagaactggaagttcatcttcaattctttctgcttcatcagaatccagtgaaaaagcaaaaagtgaggatgaaaaacatgtgaactctatttcaggaaccaaacaaagtaaagaaaaccaagtatccgcaaaaggaacatggagaaaaataaaagaaaatgaattttctcccacaaatagtacttctcagaccgtttcctcaggtgctacaaatggtgctgaatcaaagactctaatttatcaaatggcacctgctgtttctaaaacagaggatgtttgggtgagaattgaggactgtcccattaacaatcctagatctggaagatctcccacaggtaatactcccccggtgattgacagtgtttcagaaaaggcaaatccaaacattaaagattcaaaagataatcaggcaaaacaaaatgtgggtaatggcagtgttcccatgcgtaccgtgggtttggaaaatcgcctgaactcctttattcaggtggatgcccctgaccaaaaaggaactgagataaaaccaggacaaaataatcctgtccctgtatcagagactaatgaaagttctatagtggaacgtaccccattcagttctagcagctcaagcaaacacagttcacctagtgggactgttgctgccagagtgactccttttaattacaacccaagccctaggaaaagcagcgcagatagcacttcagctcggccatctcagatcccaactccagtgaataacaacacaaagaagcgagattccaaaactgacagcacagaatccagtggaacccaaagtcctaagcgccattctgggtcttaccttgtgacatctgtttaaaagagaggaagaatgaaactaagaaaattctatgttaattacaactgctatatagacattttgtttcaaatgaaactttaaaagactgaaaaattttgtaaataggtttgattcttgttagagggtttttgttctggaagccatatttgatagtatactttgtcttcactggtcttattttgggaggcactcttgatggttaggaaaaaaatagtaaagccaagtatgtttgtacagtatgttttacatgtatttaaagtagcatcccatcccaacttcctttaattattgcttgtcttaaaataatgaacactacagatagaaaatatgatatattgctgttatcaatcatttctagattataaactgactaaacttacatcagggaaaaattggtatttatgcaaaaaaaaatgtttttgtccttgtgagtccatctaacatcataattaatcatgtggctgtgaaattcacagtaatatggttcccgatgaacaagtttacccagcctgctttgctttactgcatgaatgaaactgatggttcaatttcagaagtaatgattaacagttatgtggtcacatgatgtgcatagagatagctacagtgtaataatttacactattttgtgctccaaacaaaacaaaaatctgtgtaactgtaaaacattgaatgaaactattttacctgaactagattttatctgaaagtaggtagaatttttgctatgctgtaatttgttgtatattctggtatttgaggtgagatggctgctcttttattaatgagacatgaattgtgtctcaacagaaactaaatgaacatttcagaataaattattgctgtatgtaaactgttactgaaattggtatttgtttgaagggtcttgtttcacatttgtattaataattgtttaaaatgcctcttttaaaagcttatataaatttttttcttcagcttctatgcattaagagtaaaattcctcttactgtaataaaaacaattgaagaagactgttgccacttaaccattccatgcgttggcacttatctattcctgaaatttcttttatgtgattagctcatcttgatttttaatatttttccacttaaacttttttttcttactccactggagctcagtaaaagtaaattcatgtaatagcaatgcaagcagcctagcacagactaagcattgagcataataggcccacataatttcctctttcttaatattatagaattctgtacttgaaattgattcttagacattgcagtctcttcgaggctttacagtgtaaactgtcttgccccttcatcttcttgttgcaactgggtctgacatgaacactttttatcaccctgtatgttagggcaagatctcagcagtgaagtataatcagcactttgccatgctcagaaaattcaaatcacatggaactttagaggtagatttaatacgattaagatattcagaagtatattttagaatccctgcctgttaaggaaactttatttgtggtaggtacagttctggggtacatgttaagtgtccccttatacagtggagggaagtcttccttcctgaaggaaaataaactgacacttattaactaagataatttacttaatatatcttccctgatttgttttaaaagatcagagggtgactgatgatacatgcatacatatttgttgaataaatgaaaatttatttttagtgataagattcatacactctgtatttggggagggaaaacctttttaagcatggtggggcactcagataggagtgaatacacctacctggtgccttgaaaatcacatcaagtagttaattatctaccccttacctgtgtttataacttccaggtaatgagaatgattttttttaaagctaaaatgccagtaaataaaagtgctatgacttgagctaagatatttgactccaatgcctgtactgtgtctactgcaccactttgtaaacacttcaatttactatctttgaaatgattgacctttaaatttttgccaaatgttatctgaaattgtctatgaataccatctacttctgttgttttcccaggcttccataaacaatggagatacatgcaaaaaaaaaaa

SEQ ID NO: 3 - DNA, 10740 bp, Homo sapiens
gtattggtgcagcccgccagggtgtcactggagacagaatggaggtgctgccggactcggaaatggggtccaagggtagccaaggatggctgcagcttcatatgatcagttgttaaagcaagttgaggcactgaagatggagaactcaaatcttcgacaagagctagaagataattccaatcatcttacaaaactggaaactgaggcatctaatatgaaggaagtacttaaacaactacaaggaagtattgaagatgaagctatggcttcttctggacagattgatttattagagcgtcttaaagagcttaacttagatagcagtaatttccctggagtaaaactgcggtcaaaaatgtccctccgttcttatggaagccgggaaggatctgtatcaagccgttctggagagtgcagtcctgttcctatgggttcatttccaagaagagggtttgtaaatggaagcagagaaagtactggatatttagaagaacttgagaaagagaggtcattgcttcttgctgatcttgacaaagaagaaaaggaaaaagactggtattacgctcaacttcagaatctcactaaaagaatagatagtcttcctttaactgaaaatttttccttacaaacagatatgaccagaaggcaattggaatatgaagcaaggcaaatcagagttgcgatggaagaacaactaggtacctgccaggatatggaaaaacgagcacagcgaagaatagccagaattcagcaaatcgaaaaggacatacttcgtatacgacagcttttacagtcccaagcaacagaagcagagaggtcatctcagaacaagcatgaaaccggctcacatgatgctgagcggcagaatgaaggtcaaggagtgggagaaatcaacatggcaacttctggtaatggtcagggttcaactacacgaatggaccatgaaacagccagtgttttgagttctagtagcacacactctgcacctcgaaggctgacaagtcatctgggaaccaaggtggaaatggtgtattcattgttgtcaatgcttggtactcatgataaggatgatatgtcgcgaactttgctagctatgtctagctcccaagacagctgtatatccatgcgacagtctggatgtcttcctctcctcatccagcttttacatggcaatgacaaagactctgtattgttgggaaattcccggggcagtaaagaggctcgggccagggccagtgcagcactccacaacatcattcactcacagcctgatgacaagagaggcaggcgtgaaatccgagtccttcatcttttggaacagatacgcgcttactgtgaaacctgttgggagtggcaggaagctcatgaaccaggcatggaccaggacaaaaatccaatgccagctcctgttgaacatcagatctgtcctgctgtgtgtgttctaatgaaactttcatttgatgaagagcatagacatgcaatgaatgaactagggggactacaggccattgcagaattattgcaagtggactgtgaaatgtatgggcttactaatgaccactacagtattacactaagacgatatgctggaatggctttgacaaacttgacttttggagatgtagccaacaaggctacgctatgctctatgaaaggctgcatgagagcacttgtggcccaactaaaatctgaaagtgaagacttacagcaggttattgcgagtgttttgaggaatttgtcttggcgagcagatgtaaatagtaaaaagacgttgcgagaagttggaagtgtgaaagcattgatggaatgtgctttagaagttaaaaaggaatcaaccctcaaaagcgtattgagtgccttatggaatttgtcagcacattgcactgagaataaagctgatatatgtgctgtagatggtgcacttgcatttttggttggcactcttacttaccggagccagacaaacactttagccattattgaaagtggaggtgggatattacggaatgtgtccagcttgatagctacaaatgaggaccacaggcaaatcctaagagagaacaactgtctacaaactttattacaacacttaaaatctcatagtttgacaatagtcagtaatgcatgtggaactttgtggaatctctcagcaagaaatcctaaagaccaggaagcattatgggacatgggggcagttagcatgctcaagaacctcattcattcaaagcacaaaatgattgctatgggaagtgctgcagctttaaggaatctcatggcaaataggcctgcgaagtacaaggatgccaatattatgtctcctggctcaagcttgccatctcttcatgttaggaaacaaaaagccctagaagcagaattagatgctcagcacttatcagaaacttttgacaatatagacaatttaagtcccaaggcatctcatcgtagtaagcagagacacaagcaaagtctctatggtgattatgtttttgacaccaatcgacatgatgataataggtcagacaattttaatactggcaacatgactgtcctttcaccatatttgaatactacagtgttacccagctcctcttcatcaagaggaagcttagatagttctcgttctgaaaaagatagaagtttggagagagaacgcggaattggtctaggcaactaccatccagcaacagaaaatccaggaacttcttcaaagcgaggtttgcagatctccaccactgcagcccagattgccaaagtcatggaagaagtgtcagccattcatacctctcaggaagacagaagttctgggtctaccactgaattacattgtgtgacagatgagagaaatgcacttagaagaagctctgctgcccatacacattcaaacacttacaatttcactaagtcggaaaattcaaataggacatgttctatgccttatgccaaattagaatacaagagatcttcaaatgatagtttaaatagtgtcagtagtagtgatggttatggtaaaagaggtcaaatgaaaccctcgattgaatcctattctgaagatgatgaaagtaagttttgcagttatggtcaatacccagccgacctagcccataaaatacatagtgcaaatcatatggatgataatgatggagaactagatacaccaataaattatagtcttaaatattcagatgagcagttgaactctggaaggcaaagtccttcacagaatgaaagatgggcaagacccaaacacataatagaagatgaaataaaacaaagtgagcaaagacaatcaaggaatcaaagtacaacttatcctgtttatactgagagcactgatgataaacacctcaagttccaaccacattttggacagcaggaatgtgtttctccatacaggtcacggggagccaatggttcagaaacaaatcgagtgggttctaatcatggaattaatcaaaatgtaagccagtctttgtgtcaagaagatgactatgaagatgataagcctaccaattatagtgaacgttactctgaagaagaacagcatgaagaagaagagagaccaacaaattatagcataaaatataatgaagagaaacgtcatgtggatcagcctattgattatagtttaaaatatgccacagatattccttcatcacagaaacagtcattttcattctcaaagagttcatctggacaaagcagtaaaaccgaacatatgtcttcaagcagtgagaatacgtccacaccttcatctaatgccaagaggcagaatcagctccatccaagttctgcacagagtagaagtggtcagcctcaaaaggctgccacttgcaaagtttcttctattaaccaagaaacaatacagacttattgtgtagaagatactccaatatgtttttcaagatgtagttcattatcatctttgtcatcagctgaagatgaaataggatgtaatcagacgacacaggaagcagattctgctaataccctgcaaatagcagaaataaaagaaaagattggaactaggtcagctgaagatcctgtgagcgaagttccagcagtgtcacagcaccctagaaccaaatccagcagactgcagggttctagtttatcttcagaatcagccaggcacaaagctgttgaattttcttcaggagcgaaatctccctccaaaagtggtgctcagacacccaaaagtccacctgaacactatgttcaggagaccccactcatgtttagcagatgtacttctgtcagttcacttgatagttttgagagtcgttcgattgccagctccgttcagagtgaaccatgcagtggaatggtaagtggcattataagccccagtgatcttccagatagccctggacaaaccatgccaccaagcagaagtaaaacacctccaccacctcctcaaacagctcaaaccaagcgagaagtacctaaaaataaagcacctactgctgaaaagagagagagtggacctaagcaagctgcagtaaatgctgcagttcagagggtccaggttcttccagatgctgatactttattacattttgccacggaaagtactccagatggattttcttgttcatccagcctgagtgctctgagcctcgatgagccatttatacagaaagatgtggaattaagaataatgcctccagttcaggaaaatgacaatgggaatgaaacagaatcagagcagcctaaagaatcaaatgaaaaccaagagaaagaggcagaaaaaactattgattctgaaaaggacctattagatgattcagatgatgatgatattgaaatactagaagaatgtattatttctgccatgccaacaaagtcatcacgtaaagcaaaaaagccagcccagactgcttcaaaattacctccacctgtggcaaggaaaccaagtcagctgcctgtgtacaaacttctaccatcacaaaacaggttgcaaccccaaaagcatgttagttttacaccgggggatgatatgccacgggtgtattgtgttgaagggacacctataaacttttccacagctacatctctaagtgatctaacaatcgaatcccctccaaatgagttagctgctggagaaggagttagaggaggggcacagtcaggtgaatttgaaaaacgagataccattcctacagaaggcagaagtacagatgaggctcaaggaggaaaaacctcatctgtaaccatacctgaattggatgacaataaagcagaggaaggtgatattcttgcagaatgcattaattctgctatgcccaaagggaaaagtcacaagcctttccgtgtgaaaaagataatggaccaggtccagcaagcatctgcgtcttcttctgcacccaacaaaaatcagttagatggtaagaaaaagaaaccaacttcaccagtaaaacctataccacaaaatactgaatataggacacgtgtaagaaaaaatgcagactcaaaaaataatttaaatgctgagagagttttctcagacaacaaagattcaaagaaacagaatttgaaaaataattccaaggtcttcaatgataagctcccaaataatgaagatagagtcagaggaagttttgcttttgattcacctcatcattacacgcctattgaaggaactccttactgtttttcacgaaatgattctttgagttctctagattttgatgatgatgatgttgacctttccagggaaaaggctgaattaagaaaggcaaaagaaaataaggaatcagaggctaaagttaccagccacacagaactaacctccaaccaacaatcagctaataagacacaagctattgcaaagcagccaataaatcgaggtcagcctaaacccatacttcagaaacaatccacttttccccagtcatccaaagacataccagacagaggggcagcaactgatgaaaagttacagaattttgctattgaaaatactccggtttgcttttctcataattcctctctgagttctctcagtgacattgaccaagaaaacaacaataaagaaaatgaacctatcaaagagactgagccccctgactcacagggagaaccaagtaaacctcaagcatcaggctatgctcctaaatcatttcatgttgaagataccccagtttgtttctcaagaaacagttctctcagttctcttagtattgactctgaagatgacctgttgcaggaatgtataagctccgcaatgccaaaaaagaaaaagccttcaagactcaagggtgataatgaaaaacatagtcccagaaatatgggtggcatattaggtgaagatctgacacttgatttgaaagatatacagagaccagattcagaacatggtctatcccctgattcagaaaattttgattggaaagctattcaggaaggtgcaaattccatagtaagtagtttacatcaagctgctgctgctgcatgtttatctagacaagcttcgtctgattcagattccatcctttccctgaaatcaggaatctctctgggatcaccatttcatcttacacctgatcaagaagaaaaaccctttacaagtaataaaggcccacgaattctaaaaccaggggagaaaagtacattggaaactaaaaagatagaatctgaaagtaaaggaatcaaaggaggaaaaaaagtttataaaagtttgattactggaaaagttcgatctaattcagaaatttcaggccaaatgaaacagccccttcaagcaaacatgccttcaatctctcgaggcaggacaatgattcatattccaggagttcgaaatagctcctcaagtacaagtcctgtttctaaaaaaggcccaccccttaagactccagcctccaaaagccctagtgaaggtcaaacagccaccacttctcctagaggagccaagccatctgtgaaatcagaattaagccctgttgccaggcagacatcccaaataggtgggtcaagtaaagcaccttctagatcaggatctagagattcgaccccttcaagacctgcccagcaaccattaagtagacctatacagtctcctggccgaaactcaatttcccctggtagaaatggaataagtcctcctaacaaattatctcaacttccaaggacatcatcccctagtactgcttcaactaagtcctcaggttctggaaaaatgtcatatacatctccaggtagacagatgagccaacagaaccttaccaaacaaacaggtttatccaagaatgccagtagtattccaagaagtgagtctgcctccaaaggactaaatcagatgaataatggtaatggagccaataaaaaggtagaactttctagaatgtcttcaactaaatcaagtggaagtgaatctgatagatcagaaagacctgtattagtacgccagtcaactttcatcaaagaagctccaagcccaaccttaagaagaaaattggaggaatctgcttcatttgaatctctttctccatcatctagaccagcttctcccactaggtcccaggcacaaactccagttttaagtccttcccttcctgatatgtctctatccacacattcgtctgttcaggctggtggatggcgaaaactcccacctaatctcagtcccactatagagtataatgatggaagaccagcaaagcgccatgatattgcacggtctcattctgaaagtccttctagacttccaatcaataggtcaggaacctggaaacgtgagcacagcaaacattcatcatcccttcctcgagtaagcacttggagaagaactggaagttcatcttcaattctttctgcttcatcagaatccagtgaaaaagcaaaaagtgaggatgaaaaacatgtgaactctatttcaggaaccaaacaaagtaaagaaaaccaagtatccgcaaaaggaacatggagaaaaataaaagaaaatgaattttctcccacaaatagtacttctcagaccgtttcctcaggtgctacaaatggtgctgaatcaaagactctaatttatcaaatggcacctgctgtttctaaaacagaggatgtttgggtgagaattgaggactgtcccattaacaatcctagatctggaagatctcccacaggtaatactcccccggtgattgacagtgtttcagaaaaggcaaatccaaacattaaagattcaaaagataatcaggcaaaacaaaatgtgggtaatggcagtgttcccatgcgtaccgtgggtttggaaaatcgcctgaactcctttattcaggtggatgcccctgaccaaaaaggaactgagataaaaccaggacaaaataatcctgtccctgtatcagagactaatgaaagttctatagtggaacgtaccccattcagttctagcagctcaagcaaacacagttcacctagtgggactgttgctgccagagtgactccttttaattacaacccaagccctaggaaaagcagcgcagatagcacttcagctcggccatctcagatcccaactccagtgaataacaacacaaagaagcgagattccaaaactgacagcacagaatccagtggaacccaaagtcctaagcgccattctgggtcttaccttgtgacatctgtttaaaagagaggaagaatgaaactaagaaaattctatgttaattacaactgctatatagacattttgtttcaaatgaaactttaaaagactgaaaaattttgtaaataggtttgattcttgttagagggtttttgttctggaagccatatttgatagtatactttgtcttcactggtcttattttgggaggcactcttgatggttaggaaaaaaatagtaaagccaagtatgtttgtacagtatgttttacatgtatttaaagtagcatcccatcccaacttcctttaattattgcttgtcttaaaataatgaacactacagatagaaaatatgatatattgctgttatcaatcatttctagattataaactgactaaacttacatcagggaaaaattggtatttatgcaaaaaaaaatgtttttgtccttgtgagtccatctaacatcataattaatcatgtggctgtgaaattcacagtaatatggttcccgatgaacaagtttacccagcctgctttgctttactgcatgaatgaaactgatggttcaatttcagaagtaatgattaacagttatgtggtcacatgatgtgcatagagatagctacagtgtaataatttacactattttgtgctccaaacaaaacaaaaatctgtgtaactgtaaaacattgaatgaaactattttacctgaactagattttatctgaaagtaggtagaatttttgctatgctgtaatttgttgtatattctggtatttgaggtgagatggctgctcttttattaatgagacatgaattgtgtctcaacagaaactaaatgaacatttcagaataaattattgctgtatgtaaactgttactgaaattggtatttgtttgaagggtcttgtttcacatttgtattaataattgtttaaaatgcctcttttaaaagcttatataaatttttttcttcagcttctatgcattaagagtaaaattcctcttactgtaataaaaacaattgaagaagactgttgccacttaaccattccatgcgttggcacttatctattcctgaaatttcttttatgtgattagctcatcttgatttttaatatttttccacttaaacttttttttcttactccactggagctcagtaaaagtaaattcatgtaatagcaatgcaagcagcctagcacagactaagcattgagcataataggcccacataatttcctctttcttaatattatagaattctgtacttgaaattgattcttagacattgcagtctcttcgaggctttacagtgtaaactgtcttgccccttcatcttcttgttgcaactgggtctgacatgaacactttttatcaccctgtatgttagggcaagatctcagcagtgaagtataatcagcactttgccatgctcagaaaattcaaatcacatggaactttagaggtagatttaatacgattaagatattcagaagtatattttagaatccctgcctgttaaggaaactttatttgtggtaggtacagttctggggtacatgttaagtgtccccttatacagtggagggaagtcttccttcctgaaggaaaataaactgacacttattaactaagataatttacttaatatatcttccctgatttgttttaaaagatcagagggtgactgatgatacatgcatacatatttgttgaataaatgaaaatttatttttagtgataagattcatacactctgtatttggggagggaaaacctttttaagcatggtggggcactcagataggagtgaatacacctacctggtgccttgaaaatcacatcaagtagttaattatctaccccttacctgtgtttataacttccaggtaatgagaatgattttttttaaagctaaaatgccagtaaataaaagtgctatgacttgagctaagatatttgactccaatgcctgtactgtgtctactgcaccactttgtaaacacttcaatttactatctttgaaatgattgacctttaaatttttgccaaatgttatctgaaattgtctatgaataccatctacttctgttgttttcccaggcttccataaacaatggagatacatgcaaaaaaaaaaa

SEQ ID NO: 4 - DNA, 1500 bp, Homo sapiens
tgaataaaatccaacttcttaccatgacctggaggccctacctgatttggcctctgcctaccccgaccacatctccttcccactgtccatgtcacctattctttctgtccctctttcatgtcagacttgctaccacctcaggatctgttctgttgttccctctgtctgaaagcttttgccccagatcttccagtggctcctgggcccccatggtcagtcaggcttcagattaaatgtcaactctggagaaagatcactaatcaccacctctcactgtccatcatctttctgtgtggtttgctctcttcctatcccttatcaccatcaaacattcttttgttgactgtcttttattgtctattctttcacactagaatgtaagttccgtgagtttattgtatttcctattgctgtaaatctagagcctgaaacagtatctagtatatatcggaaacccaaatgatattgttcaattaatgttgaatgaaatgaaactgaagaggtaatccaaggtaaagaacttatcaaactgtgtgagacaaacaaggatttcccggaagaggtgtttttaaattaaaactacagggtggtagtgagaggtggtagggaagcagaggtcgcagctacaaaataataacttgctcatctccgtttctccgctatcttatgagcccttgtggggctgggacagaattttattcatctttctatcatcagcgtctagtacggggagtagcaaatagtgagcactcgatagatgtttgcggaataatggactagtgtgtgcagaaggatctattaactgggctgcagcacaattcagagaaggccagtaagtgctgcaactgagactcggctgcctaggcagcaatggctcacgggacagaacagcgaagcagtgcccggcaagcggagcgcagcacccattgcgcctgcgcataacaggctctagtctccgggctgtgggaagccagcaacacctctcacgcatgcgcattgtagtcttcccacctcccacaagatggcggagggcaagtagcaagggggcggggtgtggccgccggaagcctagccgctgctcgggggggacctgcgggctcaggcccgggagctgcggaccgaggttggctcgatgctgttcccaggtactgttgttggctgttggtgaggaaggtgaagcactcagttgccttctcgggcctcggcgccccctatgtacgcctccctgggctcgggtccggtcgcccctttgcccgcttctgtaccaccctcagttctcgggtcctggagcaccggcggcagcaggagctgcgtccggcaggagacgaagagcccgggcggcgctcgtacttctggccactgggcgagcgtctggcaggtgagtgaggctgcaggcattgacgtctcctcccggcaaagcttcctcggctttgccccgccgctgctcgggaccctacggtgctcggcccgactctgtggctctcttctctccatgtctca

SEQ ID NO: 5 - DNA, 1378 bp, Homo sapiens
aggtaatccaaggtaaagaacttatcaaactgtgtgagacaaacaaggatttcccggaagaggtgtttttaaattaaaactacagggtggtagtgagaggtggtagggaagcagaggtcgcagctacaaaataataacttgctcatctccgtttctccgctatcttatgagcccttgtggggctgggacagaattttattcatctttctatcatcagcgtctagtacggggagtagcaaatagtgagcactcgatagatgtttgcggaataatggactagtgtgtgcagaaggatctattaactgggctgcagcacaattcagagaaggccagtaagtgctgcaactgagactcggctgcctaggcagcaatggctcacgggacagaacagcgaagcagtgcccggcaagcggagcgcagcacccattgcgcctgcgcataacaggctctagtctccgggctgtgggaagccagcaacacctctcacgcatgcgcattgtagtcttcccacctcccacaagatggcggagggcaagtagcaagggggcggggtgtggccgccggaagcctagccgctgctcgggggggacctgcgggctcaggcccgggagctgcggaccgaggttggctcgatgctgttcccaggtactgttgttggctgttggtgaggaaggtgaagcactcagttgccttctcgggcctcggcgccccctatgtacgcctccctgggctcgggtccggtcgcccctttgcccgcttctgtaccaccctcagttctcgggtcctggagcaccggcggcagcaggagctgcgtccggcaggagacgaagagcccgggcggcgctcgtacttctggccactgggcgagcgtctggcaggtgagtgaggctgcaggcattgacgtctcctcccggcaaagcttcctcggctttgccccgccgctgctcgggaccctacggtgctcggcccgactctgtggctctcttctctccatgtctcaccctctcccctccccgcactccccattcaggcctccagttggcccctggctttgcaggtcctccattctcacgcagtggatgggggtcgcgacgcccgccgtcctccacctttcctggctgctgctggagcttcgcccctgcaagtggtgccccattcgcgttaggtgggtgggtcgtccgcccttcccattttagtcgcttccccatcttcctcgtttggaccctcttgcttcctctaaaagttttaaactctctgcctgggaaaatacctgatagcccggcatgtggagttacaaagaaagggctgttatccaaaggccggtgaattttgttcactttgatgggagaatcaagtccccaggagccttggatggtta

SEQ ID NO: 6 - DNA, 1085 bp, Homo sapiens
atgctaattgtaaattagtatactagcagaatatacttaaatgtggtatataaaagcttgaatgttgaagttgttaaatagattatgtgttaatttggtgttttttatggtcatgttggtgcacgcttaagagacatggattctaaacacataagtagcttttgtaacttgagcaagtctctgggtctcacttgttttatctgaaaaatgagaataatttgcattgttggtttttaggtttgaaataatgaatgtatcttaaatgtgtttctaataccttgcacagagactccccataatcaccattatctcaaaatatcactattattatttggccatgatttatttattaataatgaataataggtaatatatataaggtgcgtgctttgagagtgatctgaatttttttctcagcatacttaaatgtcaagaaatacagaatcatgtcttgaagttatttagaatttcatgttaatatattgtgttctttttaacaggaagtacttaaacaactacaaggaagtattgaagatgaagctatggcttcttctggacagattgatttattagagcgtcttaaaggtagattttaaaaaggtgttttaaaataattttttaagctcaaattgtcatctttaggtgtgtagatccaagtacagcttctctcgatttgggtgttggtatcagttttcttggtatgttagccttaccctcaggatgtaattgttaaagtacaaataaataaaaaatgtatttgtgtgtcatttcttcagttaaacatttaactggctttgaatgaactattttaaatccctcccttaaataattttcggctctttgtaaagcttgttgctattctgccagtcactaaatagggctttagtattctatatgccatagacttgagcctactgtttcattggaagaagtattgtcttcttcattcaggatagaaatactttaaccttttcacatatataagttgattataattcatttttagcagttttaaaaggatatctttctcattctgttgcttgaaaattccagtgtcagaacagagaaagtgcttgataataatt

SEQ ID NO: 7 - DNA, 1202 bp, Homo sapiens
ccagtcactaaatagggctttagtattctatatgccatagacttgagcctactgtttcattggaagaagtattgtcttcttcattcaggatagaaatactttaaccttttcacatatataagttgattataattcatttttagcagttttaaaaggatatctttctcattctgttgcttgaaaattccagtgtcagaacagagaaagtgcttgataataattgaagccagacagagaaattacttttggattctaaaatattatttagaggaagtctaaggaagtacattttatctaattttcctttaacacactccttatttttaccctgacccaagtggacttttcagggaaagtcctaaataatttttgttttcagtcatgtatatttgtggttaaaatgtaaacctaatatttcactttaaaataatataacattaagaatattttagactgcttaaagcaattgttgtataaaaacttgtttctattttatttagagcttaacttagatagcagtaatttccctggagtaaaactgcggtcaaaaatgtccctccgttcttatggaagccgggaaggatctgtatcaagccgttctggagagtgcagtcctgttcctatgggttcatttccaagaagagggtttgtaaatggaagcagagaaagtactggatatttagaagaacttgagaaagagaggtaacttttcttcatatagtaaacattgccttgtgtactccagtttattgttattttgtaatataatatttaaattgtgaatttatagtaggtgatagctaacacttagagcattttgcatttttaaactcaaagatagcatgttattgattgcacttacattaaatctaaaaatataaacaaggccgtttcctgggattctgaagacctattttgtcacttattttgtttttttgtttgttttttggggtttattttgagacagggtgtcactgtgtctcccaggctggagtgtagtggcatgatctcggctcactgcaacctccacctcctgggttcaagcggttcttgtgcctcagccacccaagtagctgaaactatagacgcctaccaccacgcctggctaatttttgtatttttggtagagacggggtttcttcatgttggccaagctggttatcacttaaatactttgactactctgtacattgagtaataca

SEQ ID NO: 8 - DNA, 1109 bp, Homo sapiens
taacttcctcttatttcaaaatgacagtatatttcttattattttggctgctgtgaagctgaaagccacatcagtgtccaaagtaatagcttcttatattctgggtttgttttctgggcatcattgctgcttttcttatttcctttactatactttttattcttatattaattttgagttttgttatatgtgtatcttttacctatcattatattcttagactataaatatgaagaaagcctttggtgaagtgtaagtattcttttaaggatgattaccagtttatttagaaaaaaagttctttttaatactctaattttaatgactgtaatattctaagtcctacctttaaaaattgaaatcaatgtaaattttttgagtaattcattattagcactttaggtagagaagtttgcaataacaactgatgtaagtattgctcttctgcagtctttattagcattgtttaaacgtacctttttttaaaaaaaaaaaaataggtcattgcttcttgctgatcttgacaaagaagaaaaggaaaaagactggtattacgctcaacttcagaatctcactaaaagaatagatagtcttcctttaactgaaaatgtaagtaacttggcagtacaacttatttgaaactttaataacttgatattttaaagtacctaggtaatccattaaaattcaggataactgaatttatagttatttgtaaattgcaatatgttttacccaactttaggcctgaatatataatagttaatgaatttttgttggtaaagatgataaaactttattgtgctcaaatgttttatttaaagctcttatttagaaaatctataaagtttgaattctagaggacctcagggttcaactaggcaactagttttttaactccgtgtattgaattgccaaacatactctatagaaatatttatcaccatctgcctattttttgtactgtgttgcaggaatcatgccaaatagtttttgcaataaaaatatctctgaaaatattctagatataaatgccaatagctatagcacggatattagcatttttgcaagcactaaagctggtttgttttgtccaccagtattcacaa

SEQ ID NO: 9 - DNA, 1114 bp, Homo sapiens
catattcctcatttgattaatgaaaaagttctctcaacttaatctgtatgtatatggtaatccttaccttaagttgaagtatgagcttaagaatgatggacttgtttcttgatatttctatgttgtccacgttaatatgctagtatttaataattaaaagtagtgcctcttcagtagagaagagtcataaggcaactgaatttaacctcactctaactggaccaattatatattttaagtgaaataggccaatctaattaaagccacttgtgactttggcaaataagtgtttgaattccacgtcacatcagggatccagattgagtctgacacctataatcaaatttaaacactccttggagtaaaaaataattttctcatgcaccatgactgacgtatttgcttattcattttctttattggttcttatatgcttttttgcttttactgattaacgtaaatacaagatattgatacttttttattatttgtggttttagttttccttacaaacagatatgaccagaaggcaattggaatatgaagcaaggcaaatcagagttgcgatggaagaacaactaggtacctgccaggatatggaaaaacgagcacaggtaagttacttgtttctaagtgataaaacagcgaagagctattaggaataaaatgaattacagctctgttaatattgattaaattttattaaagacataaggctgtgtttattttggctctatttcaaaataagatttatcatggctgctgagcaacataatcaatattcacatagttgtgtctttaccatattcatttcccctggtactgttctgttctgccttggaattataagggagagacagagttagatggtggtcttccggtagctaatgactagcttcagttctcctttgaaatttttacttcttgtaatcttagactgtataaaggcattcagaacatgtcactgctcttcaaattgtgcacttaaaaaaccctcattcaaggataataggaaggaaacaaagagaattttaggagagatgaagtaagttgtatggagaacattcccatatttctaccctcaatgtcaagaaagagtattagctagctttgc

SEQ ID NO: 10 - DNA, 1105 bp, Homo sapiens
cagaagctaagagcctatcattttatttcacctaacttttattagaagatatacatatatatatatatattctatgtgaaaatatacctaagtagaagatatttgtaagcttaggtaatagtttaactgttgtatttgcagctccattaaatgtcagaatcatgtgtccttgcagaaaagatagttatttgttctacttgggttatgttcctgatagtaatgtgagcgcagctggtagaggatggcattcctgtgagtctcagaaaatcctttgtctcgtgcagctctaatgctcaagggacacacttcactttccccttaccgagatagtcgaccgccaatcgtactggaggttatgaagtgtaatacacagttccatgcctttatcagtctgtataattgatgcattcagagctttaaagcaaaaaaagaaaaaaagccttgggctaagaaagcctacaccatttttgcatgtactgatgttaactccatcttaacagaggtcatctcagaacaagcatgaaaccggctcacatgatgctgagcggcagaatgaaggtcaaggagtgggagaaatcaacatggcaacttctggtaatggtcaggtaaataaattattttatcatattttttaaaattatttaaatatcagaaaagtatgaagcaagatggttctaagaatgatctataaatcttacctattttcttagtcctgaatgcatatttccagaagcattcagtaccaatgtgctgtcatttctctttattatatcagcaataatgctgtaaggattttctagatctatttctatagctatagattgtgtgtttatgttttagtctaaaatgattgtgagtagttttttttaataactctaagctgcattttgattatgtatatgatttgacctagttatttttgcttgccttgaataggtttgctctttcactaagaccttcaatgtaaagacatttttatggttttttttaaagttataaaggctttatttcctgttgtacttaaagattatataaatctagaaatccaagtcttactgaaaaagataattgtaatgcacacaaaaaagtaaggcaacatggccta

SEQ ID NO: 11 - DNA, 1099 bp, Homo sapiens
ggtgtttatattatactgcactgcagtcatttattttttcatgtctttgtccagtaaaagttttaaacagccctttctaaactgtgagatcttagagaacttggactgtagcaaattcatacttagttttctggcaatttggagcatttcagaatttgaacattccttcaatgcttttcatcaatgaacttatctgaatgtggttttatttatttagatctatgaaaaattactaccctagaatttcttcagtctttggttaagtccattctgcagtttaatgctcatatgcaagaaactctcttttctttagtttttctctaaaacatacttagtaagcgtataggtaaaaaatattttgaacagttataatggtcatacttttatgatgtatttaattgtttatcatacagacacttcatttggagtaccttaacatgatgttatctgtatttacctatagtctaaattataccatctataatgtgcttaatttttagggttcaactacacgaatggaccatgaaacagccagtgttttgagttctagtagcacacactctgcacctcgaaggctgacaagtcatctgggaaccaaggtaacagaagattacaaaccctggtcactaatgccatgactactttgctaagacattcttggccaggtgcagtggctcacacctgtaatcccagcattttgggaggccaaggcaggtggatcacttgaggccaggagttcaagaccagcctgggcaacgtggcaaaaccccatctctactaaaaatacaaaaatttagccagtgtggtggcacacacctgtggtcccagctactcaggaggctgaggcatgagaatagttggaacccaggaggcagaggttgcagtgagctgagattacaccgctttctagtggagaattctgattcacagtctcttgaagaaattacatatttttatacaacgaagcataaacaagggaaaaatcaggtttataaaaagtgccagattagctaatttttaattctttttcagtctttacatccacttttctgcaagaatactgagttccagccaaactggctcacttcctgcttcctga

SEQ ID NO: 12 - DNA, 1379 bp, Homo sapiens
gacgagaattaatgattgctgagaattagtacttaaaattgttgcagaaatgttttctgtttattgcttataggtatagattaaaagaaataagataaagttttaaattatgtaaagatttagataaactacattctctatgtgtgtgaaatccgttgtttttcactgattatagtcagtggattagcaccaacttatctaggcaaacagcactaacagtttgttagtgagtatgcaaaaacctacttttgcttttaatactgtatattaccactcatactatttactcacataaacaaattggtgatgatacatagattttgaaataacactgattacttcatcctggaaaggttttccggttttttgttttttttttggcggggggggttgttttgtttttttagagttatagtaaatatcccattcatcacttaattggtttttggcttttggatattaaagtcgtaattttgtttctaaactcatttggcccacaggtggaaatggtgtattcattgttgtcaatgcttggtactcatgataaggatgatatgtcgcgaactttgctagctatgtctagctcccaagacagctgtatatccatgcgacagtctggatgtcttcctctcctcatccagcttttacatggcaatgacaaagactctgtattgttgggaaattcccggggcagtaaagaggctcgggccagggccagtgcagcactccacaacatcattcactcacagcctgatgacaagagaggcaggcgtgaaatccgagtccttcatcttttggaacagatacgcgcttactgtgaaacctgttgggagtggcaggaagctcatgaaccaggcatggaccaggacaaaaatccaagtatgttctctatagtgtacatcgtagtgcatgtttcaaagcaaatgtgaaatttttaaacagaaaacatgtttagttaatatgctgtctttatgactaagaggagaaaattcatatcagccatttgtgctactcatatttaaaagattaagtctgtatttccctagaaaaatttagcaaaggaaaatgttatgtgcactactataagaacagtaagtcaagagaaatttatacaatcatagcatagtagggccttagtagagctagaaagaacttgagcaattatgttgcccatctttcacttcatagctgaagctcatttcatagatgaaagtgactttacgtaagttcctatagccattagtgtccaaaccataatcttttacatttgcatatcattatattcaggggatacagagcagcgttacatctgttatgttatttgctcctcacatcaacctactgaagtaggaagggaaggtattatcatctccatttta

SEQ ID NO: 13 - DNA, 1096 bp, Homo sapiens
gctccggaagctgaggcaggaaggtcaattgagcccaggaatacaaggctgcggtgaaagctatgatcattccactcgagcctgggcaacagagcaagaccctgttttgttttttttttgttgtttttttaaagaaagaaagaaattataaacaaaattaaaccattttataccaaaatatttttattattttgtatactcaacataattttaagttattagctatatgagtaatagcataaacctcctagacttattctaagagacttagtcaagggcagatgagtggtaaacatttttatggaaacaaatccctttattcctattttttgttccacatttgtagtatttattcatcctttcagcaaatatttgttgatccactaaaattccgtgaattagggttatattagtgatccctgcatatttttaaagtacaataaacatcattgctcttcaaataacaaagcattatggtttatgttgattttatttttcagtgccagctcctgttgaacatcagatctgtcctgctgtgtgtgttctaatgaaactttcatttgatgaagagcatagacatgcaatgaatgaactaggtaagacaaaaatgttttttaatgacatagacaattactggtggatttttaaatcatggtagaaattcagtatagtaaataaagatttttaatcattgatgaattaggatataaggccaccaacttctgttatcagctgcttcctctgtgtagcaaaaaattgtaccctggtttccagcatagaaaggatcctgaatcacagaaactgctaccctgtcataagctaactttttcaaaatcgaagccggagattgaaaaaaaatgacaaaatgggtcactctttgtcccttttgccaaagtagactctatatgtgccagctgatgaggatggtaatttgaattattttgaaatgtggagctgctgtattgtgattgaactcagtcacttttgatgagcatcagagggaattattattaagattgtcatttatcttcatggttattggtactttacaggattttcatcataagcagcctggtatctttgaaattggttaata

SEQ ID NO: 14 - DNA, 1140 bp, Homo sapiens
tttttagtttttcttcatgcacagtttcatttaaaggcatccgtattcctaagggtaattatttgccaaaaaaaaaaaattaaagtagttaggccacagtgtatgacaataaagagtgtttataaagccctaataataataataagttacctttttctgcttatgttcacgaagaactagtgttagaaaatagccttcttcactgttggcaaggtgcagtgtatatgcagtaaatagaaaataattatttcgctcagcaagataaggggctgggggtggagaaactggcataaaatggaataattgtcagttgtactttataaatatattatacagaagttctttataacagtttttgtagcttataattctaaaggcaaatttaaaccatatattctcattgattgagtttttttttcctagtatttaagttaccaacttggtaccagtttgttttattttagatgattgtctttttcctcttgccctttttaaattagggggactacaggccattgcagaattattgcaagtggactgtgaaatgtatgggcttactaatgaccactacagtattacactaagacgatatgctggaatggctttgacaaacttgacttttggagatgtagccaacaaggtatgtttttataacatgtatttcttaagatagctcaggtatgagttaatttactttcatacaaatacattttactgattttcttttttttcactctcctcattaaacaatgactgataaaaacctgtgcttcacattcgcttatctttactcatttgtttgtcttatgcctaaacaaaggcaaaggtacatctacagatggaacacagtagtgaatttatgtaattgcattaaaaacaccattcataagaatatacttgtagggatcatttctgtgatccattactagagaagtttaactgtgtagaattaaaaaataaaagataaaacacttcctaggaatgggattaaaaatctaaaaattcttaagaccaaggcaagtgttacacacacattgattccatccaaataagaggctttactctaaaacctgttgcttatcatttctcaccacttattcactttatttctctagtttgacaaaggaagaacagatagca

SEQ ID NO: 15 - DNA, 1078 bp, Homo sapiens
caaaggtacatctacagatggaacacagtagtgaatttatgtaattgcattaaaaacaccattcataagaatatacttgtagggatcatttctgtgatccattactagagaagtttaactgtgtagaattaaaaaataaaagataaaacacttcctaggaatgggattaaaaatctaaaaattcttaagaccaaggcaagtgttacacacacattgattccatccaaataagaggctttactctaaaacctgttgcttatcatttctcaccacttattcactttatttctctagtttgacaaaggaagaacagatagcaaagaattaggagaatatttgtcttttatttaggtaatcttattctagattttttatgagtgaagtatcagttatgattaaaacaaaataatgaaaactgaattagacatttagtagccaaaaataaagcttggcttcaagttgtctttttaatgatcctctattctgtatttaatttacaggctacgctatgctctatgaaaggctgcatgagagcacttgtggcccaactaaaatctgaaagtgaagacttacagcaggtactatttagaatttcacctgtttttcttttttctctttttctttgaggcagggtctcactctgtcacccaggcttagagggcagttgtgcaatctcagctcactgcaacctctgcctccagggttcaagcaatcctcccacttcagcctctcgaggctgggcctacaggtgcacaccaccatgccaaacgaatttttgtattttttatagagacggggtttcaccacacctgggctcaagcaatctgcccacctcagcatctcaaaatgctgggattacaggcgtgtgccaccacacccagctaatatcctgatttagattgttgctcagtatttagtatctcatgtataaaagatagttccattaacactagaaaaagaaaaataattatattgtggttagactgtaggaaatctttttggcactgtagtagcatttaggaggaatttaaaaaaaaaaaaaaaaacaggatctccctctcttgcccaggctggagtg

SEQ ID NO: 16 - DNA, 1117 bp, Homo sapiens
ataaaagatagttccattaacactagaaaaagaaaaataattatattgtggttagactgtaggaaatctttttggcactgtagtagcatttaggaggaatttaaaaaaaaaaaaaaaaacaggatctccctctcttgcccaggctggagtgcagtggtgcgattatggctcacagtaacctcaagctcctgggatcctcctgcttcagcctcccaagtagctagaactactgcaggcgcatgccaccatgcccagctaatttttaaaaagttttcatagagacagggtctcactgtgttacccagaaggtcttgaactcctggtctcaggagatcctcctgcctcagcctcccaaagtgataggattacaggcgtgagtcaccacggctagccagaatttctttcttaatagatttctattcttactgctagcattaaaaacaaaaaagcaactagtatgattttatgtataaattaatctaaaattgattaatttgcaggttattgcgagtgttttgaggaatttgtcttggcgagcagatgtaaatagtaaaaagacgttgcgagaagttggaagtgtgaaagcattgatggaatgtgctttagaagttaaaaaggtacctttgaaaacatttagtactataatatgaatttcatgtttggcttttttttgctgccttcttttagccatgagatttcctaatttcttacctgtgtattattcagtactataatatgaatttcatgtttagctttttttgctgccttcttttagccatgagattccctaatttcttttttgagatggggtctctttctctcgcccaggctggagtgcagtggtctgatcttggctcactgcaacctccgtctcccatgttcaagtgattctcctgcctcagcctcctgagtagctgggattacagtgcacgccaccactcccggctatttgtatttttagtagagatggggtttcaccatgttggtaaggctggtctcgaactactcctgactttgtgatctgcccaactcggcctcccaaagtgctgggattataggcgcaagccatcacgcccagcctagattccctaatttcttacctgtttatctcaccagt

SEQ ID NO: 17 - DNA, 1215 bp, Homo sapiens
gcgaggctggtcttgaactcctgacctcagatgatccacccgtcagcctcccaaagtgctgggattacaggcatgagccactgtgcccggccacatgccgggccttaatccacttcctgttcacttttttttttcttttttcaagcaaccccagcctgagaataacccacattctattctgaaaatgttttcttttcataatgcacatcagttgtgcctcatattctaagatgtgtgtactatctaaacacttagaataaagtttataaaagtcattagttaaatattgtgttctgcttgttttatagagatatcactgatataaatactatttggtattttatgaacatttttctaaatggaaagttcttaatttaccagtgagggacgggcaataggatagattaaaaaatagcttttattcaatatcagtaacatagaagttaatgagagacaaattccaactctaattagatgacccatattctgtttcttactaggaatcaaccctcaaaagcgtattgagtgccttatggaatttgtcagcacattgcactgagaataaagctgatatatgtgctgtagatggtgcacttgcatttttggttggcactcttacttaccggagccagacaaacactttagccattattgaaagtggaggtgggatattacggaatgtgtccagcttgatagctacaaatgaggaccacaggtatatatagagttttatattacttttaaagtacagaattcatactctcaaaaagacctaattgtaagcaatgttttatataatcatgaaagttttaagccaaaatatatttattactgtgaaaagataactactaactcttagtttaactcattagtgtacttaatgtaataacagtttatagtattatagaggagactaaattaagcaaattatagttgagaggtgtagcccataggtggaggaaaaaatagtcacaaatattgtaacaaaataatccatttctattagtatagtataaaagagtatgaaaacaaaatttagaacaagacaaaaactatgagcgtgatccagagaatataaaggttcacatttttctaatgatgtcttagtatccataataataattttttttttttttttttgagacagggtctcactctgtctcccagactggagggcagtgttgtgatcttggctcactgcaacctccacctcct

SEQ ID NO: 18 - DNA, 9687 bp, Homo sapiens
gagattactctaaaaagtaagtgttctaatctaagagcttataatgtgcactgactgcagaaaaatcttcaatcaattctatctacctcttccaagataactcaatatcaatatcagagtggcacccaaccatagattaaattaccacaaagttcctattcaacataggatttcatgatatagtttttaaattgggaaactgttatatgaatagagtaaatgtatgtgccccaccccctgcaaatgttttaagctattgggtcagaataggaaatgtagaattgacaaaaaataacacctttactttttttagtgtgacagattagtactttaaaacattaaacattacatgaaattagaacaaaaggagatgtggaatacttggaatttataggataattggtacaatcatattatgccttttgtcttctatccttttatttgttgttactgcatacacattgtgaccttaattttgtgatctcttgattttatttcaggcaaatcctaagagagaacaactgtctacaaactttattacaacacttaaaatctcatagtttgacaatagtcagtaatgcatgtggaactttgtggaatctctcagcaagaaatcctaaagaccaggaagcattatgggacatgggggcagttagcatgctcaagaacctcattcattcaaagcacaaaatgattgctatgggaagtgctgcagctttaaggaatctcatggcaaataggcctgcgaagtacaaggatgccaatattatgtctcctggctcaagcttgccatctcttcatgttaggaaacaaaaagccctagaagcagaattagatgctcagcacttatcagaaacttttgacaatatagacaatttaagtcccaaggcatctcatcgtagtaagcagagacacaagcaaagtctctatggtgattatgtttttgacaccaatcgacatgatgataataggtcagacaattttaatactggcaacatgactgtcctttcaccatatttgaatactacagtgttacccagctcctcttcatcaagaggaagcttagatagttctcgttctgaaaaagatagaagtttggagagagaacgcggaattggtctaggcaactaccatccagcaacagaaaatccaggaacttcttcaaagcgaggtttgcagatctccaccactgcagcccagattgccaaagtcatggaagaagtgtcagccattcatacctctcaggaagacagaagttctgggtctaccactgaattacattgtgtgacagatgagagaaatgcacttagaagaagctctgctgcccatacacattcaaacacttacaatttcactaagtcggaaaattcaaataggacatgttctatgccttatgccaaattagaatacaagagatcttcaaatgatagtttaaatagtgtcagtagtagtgatggttatggtaaaagaggtcaaatgaaaccctcgattgaatcctattctgaagatgatgaaagtaagttttgcagttatggtcaatacccagccgacctagcccataaaatacatagtgcaaatcatatggatgataatgatggagaactagatacaccaataaattatagtcttaaatattcagatgagcagttgaactctggaaggcaaagtccttcacagaatgaaagatgggcaagacccaaacacataatagaagatgaaataaaacaaagtgagcaaagacaatcaaggaatcaaagtacaacttatcctgtttatactgagagcactgatgataaacacctcaagttccaaccacattttggacagcaggaatgtgtttctccatacaggtcacggggagccaatggttcagaaacaaatcgagtgggttctaatcatggaattaatcaaaatgtaagccagtctttgtgtcaagaagatgactatgaagatgataagcctaccaattatagtgaacgttactctgaagaagaacagcatgaagaagaagagagaccaacaaattatagcataaaatataatgaagagaaacgtcatgtggatcagcctattgattatagtttaaaatatgccacagatattccttcatcacagaaacagtcattttcattctcaaagagttcatctggacaaagcagtaaaaccgaacatatgtcttcaagcagtgagaatacgtccacaccttcatctaatgccaagaggcagaatcagctccatccaagttctgcacagagtagaagtggtcagcctcaaaaggctgccacttgcaaagtttcttctattaaccaagaaacaatacagacttattgtgtagaagatactccaatatgtttttcaagatgtagttcattatcatctttgtcatcagctgaagatgaaataggatgtaatcagacgacacaggaagcagattctgctaataccctgcaaatagcagaaataaaagaaaagattggaactaggtcagctgaagatcctgtgagcgaagttccagcagtgtcacagcaccctagaaccaaatccagcagactgcagggttctagtttatcttcagaatcagccaggcacaaagctgttgaattttcttcaggagcgaaatctccctccaaaagtggtgctcagacacccaaaagtccacctgaacactatgttcaggagaccccactcatgtttagcagatgtacttctgtcagttcacttgatagttttgagagtcgttcgattgccagctccgttcagagtgaaccatgcagtggaatggtaagtggcattataagccccagtgatcttccagatagccctggacaaaccatgccaccaagcagaagtaaaacacctccaccacctcctcaaacagctcaaaccaagcgagaagtacctaaaaataaagcacctactgctgaaaagagagagagtggacctaagcaagctgcagtaaatgctgcagttcagagggtccaggttcttccagatgctgatactttattacattttgccacggaaagtactccagatggattttcttgttcatccagcctgagtgctctgagcctcgatgagccatttatacagaaagatgtggaattaagaataatgcctccagttcaggaaaatgacaatgggaatgaaacagaatcagagcagcctaaagaatcaaatgaaaaccaagagaaagaggcagaaaaaactattgattctgaaaaggacctattagatgattcagatgatgatgatattgaaatactagaagaatgtattatttctgccatgccaacaaagtcatcacgtaaagcaaaaaagccagcccagactgcttcaaaattacctccacctgtggcaaggaaaccaagtcagctgcctgtgtacaaacttctaccatcacaaaacaggttgcaaccccaaaagcatgttagttttacaccgggggatgatatgccacgggtgtattgtgttgaagggacacctataaacttttccacagctacatctctaagtgatctaacaatcgaatcccctccaaatgagttagctgctggagaaggagttagaggaggggcacagtcaggtgaatttgaaaaacgagataccattcctacagaaggcagaagtacagatgaggctcaaggaggaaaaacctcatctgtaaccatacctgaattggatgacaataaagcagaggaaggtgatattcttgcagaatgcattaattctgctatgcccaaagggaaaagtcacaagcctttccgtgtgaaaaagataatggaccaggtccagcaagcatctgcgtcttcttctgcacccaacaaaaatcagttagatggtaagaaaaagaaaccaacttcaccagtaaaacctataccacaaaatactgaatataggacacgtgtaagaaaaaatgcagactcaaaaaataatttaaatgctgagagagttttctcagacaacaaagattcaaagaaacagaatttgaaaaataattccaaggtcttcaatgataagctcccaaataatgaagatagagtcagaggaagttttgcttttgattcacctcatcattacacgcctattgaaggaactccttactgtttttcacgaaatgattctttgagttctctagattttgatgatgatgatgttgacctttccagggaaaaggctgaattaagaaaggcaaaagaaaataaggaatcagaggctaaagttaccagccacacagaactaacctccaaccaacaatcagctaataagacacaagctattgcaaagcagccaataaatcgaggtcagcctaaacccatacttcagaaacaatccacttttccccagtcatccaaagacataccagacagaggggcagcaactgatgaaaagttacagaattttgctattgaaaatactccggtttgcttttctcataattcctctctgagttctctcagtgacattgaccaagaaaacaacaataaagaaaatgaacctatcaaagagactgagccccctgactcacagggagaaccaagtaaacctcaagcatcaggctatgctcctaaatcatttcatgttgaagataccccagtttgtttctcaagaaacagttctctcagttctcttagtattgactctgaagatgacctgttgcaggaatgtataagctccgcaatgccaaaaaagaaaaagccttcaagactcaagggtgataatgaaaaacatagtcccagaaatatgggtggcatattaggtgaagatctgacacttgatttgaaagatatacagagaccagattcagaacatggtctatcccctgattcagaaaattttgattggaaagctattcaggaaggtgcaaattccatagtaagtagtttacatcaagctgctgctgctgcatgtttatctagacaagcttcgtctgattcagattccatcctttccctgaaatcaggaatctctctgggatcaccatttcatcttacacctgatcaagaagaaaaaccctttacaagtaataaaggcccacgaattctaaaaccaggggagaaaagtacattggaaactaaaaagatagaatctgaaagtaaaggaatcaaaggaggaaaaaaagtttataaaagtttgattactggaaaagttcgatctaattcagaaatttcaggccaaatgaaacagccccttcaagcaaacatgccttcaatctctcgaggcaggacaatgattcatattccaggagttcgaaatagctcctcaagtacaagtcctgtttctaaaaaaggcccaccccttaagactccagcctccaaaagccctagtgaaggtcaaacagccaccacttctcctagaggagccaagccatctgtgaaatcagaattaagccctgttgccaggcagacatcccaaataggtgggtcaagtaaagcaccttctagatcaggatctagagattcgaccccttcaagacctgcccagcaaccattaagtagacctatacagtctcctggccgaaactcaatttcccctggtagaaatggaataagtcctcctaacaaattatctcaacttccaaggacatcatcccctagtactgcttcaactaagtcctcaggttctggaaaaatgtcatatacatctccaggtagacagatgagccaacagaaccttaccaaacaaacaggtttatccaagaatgccagtagtattccaagaagtgagtctgcctccaaaggactaaatcagatgaataatggtaatggagccaataaaaaggtagaactttctagaatgtcttcaactaaatcaagtggaagtgaatctgatagatcagaaagacctgtattagtacgccagtcaactttcatcaaagaagctccaagcccaaccttaagaagaaaattggaggaatctgcttcatttgaatctctttctccatcatctagaccagcttctcccactaggtcccaggcacaaactccagttttaagtccttcccttcctgatatgtctctatccacacattcgtctgttcaggctggtggatggcgaaaactcccacctaatctcagtcccactatagagtataatgatggaagaccagcaaagcgccatgatattgcacggtctcattctgaaagtccttctagacttccaatcaataggtcaggaacctggaaacgtgagcacagcaaacattcatcatcccttcctcgagtaagcacttggagaagaactggaagttcatcttcaattctttctgcttcatcagaatccagtgaaaaagcaaaaagtgaggatgaaaaacatgtgaactctatttcaggaaccaaacaaagtaaagaaaaccaagtatccgcaaaaggaacatggagaaaaataaaagaaaatgaattttctcccacaaatagtacttctcagaccgtttcctcaggtgctacaaatggtgctgaatcaaagactctaatttatcaaatggcacctgctgtttctaaaacagaggatgtttgggtgagaattgaggactgtcccattaacaatcctagatctggaagatctcccacaggtaatactcccccggtgattgacagtgtttcagaaaaggcaaatccaaacattaaagattcaaaagataatcaggcaaaacaaaatgtgggtaatggcagtgttcccatgcgtaccgtgggtttggaaaatcgcctgaactcctttattcaggtggatgcccctgaccaaaaaggaactgagataaaaccaggacaaaataatcctgtccctgtatcagagactaatgaaagttctatagtggaacgtaccccattcagttctagcagctcaagcaaacacagttcacctagtgggactgttgctgccagagtgactccttttaattacaacccaagccctaggaaaagcagcgcagatagcacttcagctcggccatctcagatcccaactccagtgaataacaacacaaagaagcgagattccaaaactgacagcacagaatccagtggaacccaaagtcctaagcgccattctgggtcttaccttgtgacatctgtttaaaagagaggaagaatgaaactaagaaaattctatgttaattacaactgctatatagacattttgtttcaaatgaaactttaaaagactgaaaaattttgtaaataggtttgattcttgttagagggtttttgttctggaagccatatttgatagtatactttgtcttcactggtcttattttgggaggcactcttgatggttaggaaaaaaatagtaaagccaagtatgtttgtacagtatgttttacatgtatttaaagtagcatcccatcccaacttcctttaattattgcttgtcttaaaataatgaacactacagatagaaaatatgatatattgctgttatcaatcatttctagattataaactgactaaacttacatcagggaaaaattggtatttatgcaaaaaaaaatgtttttgtccttgtgagtccatctaacatcataattaatcatgtggctgtgaaattcacagtaatatggttcccgatgaacaagtttacccagcctgctttgctttactgcatgaatgaaactgatggttcaatttcagaagtaatgattaacagttatgtggtcacatgatgtgcatagagatagctacagtgtaataatttacactattttgtgctccaaacaaaacaaaaatctgtgtaactgtaaaacattgaatgaaactattttacctgaactagattttatctgaaagtaggtagaatttttgctatgctgtaatttgttgtatattctggtatttgaggtgagatggctgctcttttattaatgagacatgaattgtgtctcaacagaaactaaatgaacatttcagaataaattattgctgtatgtaaactgttactgaaattggtatttgtttgaagggtcttgtttcacatttgtattaataattgtttaaaatgcctcttttaaaagcttatataaatttttttcttcagcttctatgcattaagagtaaaattcctcttactgtaataaaaacaattgaagaagactgttgccacttaaccattccatgcgttggcacttatctattcctgaaatttcttttatgtgattagctcatcttgatttttaatatttttccacttaaacttttttttcttactccactggagctcagtaaaagtaaattcatgtaatagcaatgcaagcagcctagcacagactaagcattgagcataataggcccacataatttcctctttcttaatattatagaattctgtacttgaaattgattcttagacattgcagtctcttcgaggctttacagtgtaaactgtcttgccccttcatcttcttgttgcaactgggtctgacatgaacactttttatcaccctgtatgttagggcaagatctcagcagtgaagtataatcagcactttgccatgctcagaaaattcaaatcacatggaactttagaggtagatttaatacgattaagatattcagaagtatattttagaatccctgcctgttaaggaaactttatttgtggtaggtacagttctggggtacatgttaagtgtccccttatacagtggagggaagtcttccttcctgaaggaaaataaactgacacttattaactaagataatttacttaatatatcttccctgatttgttttaaaagatcagagggtgactgatgatacatgcatacatatttgttgaataaatgaaaatttatttttagtgataagattcatacactctgtatttggggagggaaaacctttttaagcatggtggggcactcagataggagtgaatacacctacctggtgccttgaaaatcacatcaagtagttaattatctaccccttacctgtgtttataacttccaggtaatgagaatgattttttttaaagctaaaatgccagtaaataaaagtgctatgacttgagctaagatatttgactccaatgcctgtactgtgtctactgcaccactttgtaaacacttcaatttactatctttgaaatgattgacctttaaatttttgccaaatgttatctgaaattgtctatgaataccatctacttctgttgttttcccaggcttccataaacaatggagatacatgcatataggtcatactggtttcctttcattttttgattttctatttctaattttctgaattactgcatgccagttgttgcaaaccacttcaagtacttctatggaaagagatggatgttagtcaattagataaacttgccttttaattcaaataaggaagaaaatataaatgctgaaaatgaacattccacatgccagaaaagtggaatttttgtaggcaacacttgagtggggggagacgggccagtctatactacccattgaagtaaagactgctggatgaggccctctgttagagatagtggttctgaattagtaaaggggcaaatctcaattctaattatagatgttcacagggtgctgctataatcgatagcaggccaaatattcccagtttatgcttgttaacaaatggcatactaagcccagcgttgggaattagtcaggagttacgatgcctgtttagagaggagtgggggagggagagttacctaacgtaaggc

SEQ ID NO: 19 - DNA, 1500 bp, Homo sapiens
taagataatttacttaatatatcttccctgatttgttttaaaagatcagagggtgactgatgatacatgcatacatatttgttgaataaatgaaaatttatttttagtgataagattcatacactctgtatttggggagggaaaacctttttaagcatggtggggcactcagataggagtgaatacacctacctggtgccttgaaaatcacatcaagtagttaattatctaccccttacctgtgtttataacttccaggtaatgagaatgattttttttaaagctaaaatgccagtaaataaaagtgctatgacttgagctaagatatttgactccaatgcctgtactgtgtctactgcaccactttgtaaacacttcaatttactatctttgaaatgattgacctttaaatttttgccaaatgttatctgaaattgtctatgaataccatctacttctgttgttttcccaggcttccataaacaatggagatacatgcatataggtcatactggtttcctttcattttttgattttctatttctaattttctgaattactgcatgccagttgttgcaaaccacttcaagtacttctatggaaagagatggatgttagtcaattagataaacttgccttttaattcaaataaggaagaaaatataaatgctgaaaatgaacattccacatgccagaaaagtggaatttttgtaggcaacacttgagtggggggagacgggccagtctatactacccattgaagtaaagactgctggatgaggccctctgttagagatagtggttctgaattagtaaaggggcaaatctcaattctaattatagatgttcacagggtgctgctataatcgatagcaggccaaatattcccagtttatgcttgttaacaaatggcatactaagcccagcgttgggaattagtcaggagttacgatgcctgtttagagaggagtgggggagggagagttacctaacgtaaggcacttcaaaggagtgcgttgggatcaccaggagtgcttaacaagacatagctgggccatacccccagtttgattcaggatgtttggaatggggcctaagaacttgcatatctaacaagttcaaaggtgaggctaatgctgctggtctggagaccacactttttgagaattactgccctaagatcacagtgaagctccttgagtggttgccttcagctctagcgattcctcccaacaactggacccttaatctgacaaagtatagcaacagataaaagacttcccctaggcataaaagatttcaatattaagccatccaatttcataatgctcatctcaactcctgacagcagacaaacttagccagacatgaacaaacaagtaattctaaagacagtgattatatttgaaggatcagttaatgttccctttgagactgtcattataaaaagcagtaacttcagcaaagatctaatttgaattttcaataagattaaaagac

SEQ ID NO: 20 - DNA, 13147 bp, Homo sapiens
ccggagcccgagccgaagggcgagccgcaaacgctaagtcgctggccattggtggacatggcgcaggcgcgtttgctccgacgggccgaatgttttggggcagtgttttgagcgcggagaccgcgtgatactggatgcgcatgggcataccgtgctctgcggctgcttggcgttgcttcttcctccagaagtgggcgctgggcagtcacgcagggtttgaaccggaagcgggagtaggtagctgcgtggctaacggagaaaagaagccgtggccgcgggaggaggcgagaggagtcgggatctgcgctgcagccaccgccgcggttgatactactttgaccttccgagtgcagtgacagtgatgtgtgttctgaaattgtgaaccatgagtctagtacttaatgatctgcttatctgctgccgtcaactagaacatgatagagctacagaacgaaagaaagaagttgagaaatttaagcgcctgattcgagatcctgaaacaattaaacatctagatcggcattcagattccaaacaaggaaaatatttgaattgggatgctgtttttagatttttacagaaatatattcagaaagaaacagaatgtctgagaatagcaaaaccaaatgtatcagcctcaacacaagcctccaggcagaaaaagatgcaggaaatcagtagtttggtcaaatacttcatcaaatgtgcaaacagaagagcacctaggctaaaatgtcaagaactcttaaattatatcatggatacagtgaaagattcatctaatggtgctatttacggagctgattgtagcaacatactactcaaagacattctttctgtgagaaaatactggtgtgaaatatctcagcaacagtggttagaattgttctctgtgtacttcaggctctatctgaaaccttcacaagatgttcatagagttttagtggctagaataattcatgctgttaccaaaggatgctgttctcagactgacggattaaattccaaatttttggactttttttccaaggctattcagtgtgcgagacaagaaaagagctcttcaggtctaaatcatatcttagcagctcttactatcttcctcaagactttggctgtcaactttcgaattcgagtgtgtgaattaggagatgaaattcttcccactttgctttatatttggactcaacataggcttaatgattctttaaaagaagtcattattgaattatttcaactgcaaatttatatccatcatccgaaaggagccaaaacccaagaaaaaggtgcttatgaatcaacaaaatggagaagtattttatacaacttatatgatctgctagtgaatgagataagtcatataggaagtagaggaaagtattcttcaggatttcgtaatattgccgtcaaagaaaatttgattgaattgatggcagatatctgtcaccaggtttttaatgaagataccagatccttggagatttctcaatcttacactactacacaaagagaatctagtgattacagtgtcccttgcaaaaggaagaaaatagaactaggctgggaagtaataaaagatcaccttcagaagtcacagaatgattttgatcttgtgccttggctacagattgcaacccaattaatatcaaagtatcctgcaagtttacctaactgtgagctgtctccattactgatgatactatctcagcttctaccccaacagcgacatggggaacgtacaccatatgtgttacgatgccttacggaagttgcattgtgtcaagacaagaggtcaaacctagaaagctcacaaaagtcagatttattaaaactctggaataaaatttggtgtattacctttcgtggtataagttctgagcaaatacaagctgaaaactttggcttacttggagccataattcagggtagtttagttgaggttgacagagaattctggaagttatttactgggtcagcctgcagaccttcatgtcctgcagtatgctgtttgactttggcactgaccaccagtatagttccaggaacggtaaaaatgggaatagagcaaaatatgtgtgaagtaaatagaagcttttctttaaaggaatcaataatgaaatggctcttattctatcagttagagggtgacttagaaaatagcacagaagtgcctccaattcttcacagtaattttcctcatcttgtactggagaaaattcttgtgagtctcactatgaaaaactgtaaagctgcaatgaattttttccaaagcgtgccagaatgtgaacaccaccaaaaagataaagaagaactttcattctcagaagtagaagaactatttcttcagacaacttttgacaagatggactttttaaccattgtgagagaatgtggtatagaaaagcaccagtccagtattggcttctctgtccaccagaatctcaaggaatcactggatcgctgtcttctgggattatcagaacagcttctgaataattactcatctgagattacaaattcagaaactcttgtccggtgttcacgtcttttggtgggtgtccttggctgctactgttacatgggtgtaatagctgaagaggaagcatataagtcagaattattccagaaagccaagtctctaatgcaatgtgcaggagaaagtatcactctgtttaaaaataagacaaatgaggaattcagaattggttccttgagaaatatgatgcagctatgtacacgttgcttgagcaactgtaccaagaagagtccaaataagattgcatctggctttttcctgcgattgttaacatcaaagctaatgaatgacattgcagatatttgtaaaagtttagcatccttcatcaaaaagccatttgaccgtggagaagtagaatcaatggaagatgatactaatggaaatctaatggaggtggaggatcagtcatccatgaatctatttaacgattaccctgatagtagtgttagtgatgcaaacgaacctggagagagccaaagtaccataggtgccattaatcctttagctgaagaatatctgtcaaagcaagatctacttttcttagacatgctcaagttcttgtgtttgtgtgtaactactgctcagaccaatactgtgtcctttagggcagctgatattcggaggaaattgttaatgttaattgattctagcacgctagaacctaccaaatccctccacctgcatatgtatctaatgcttttaaaggagcttcctggagaagagtaccccttgccaatggaagatgttcttgaacttctgaaaccactatccaatgtgtgttctttgtatcgtcgtgaccaagatgtttgtaaaactattttaaaccatgtccttcatgtagtgaaaaacctaggtcaaagcaatatggactctgagaacacaagggatgctcaaggacagtttcttacagtaattggagcattttggcatctaacaaaggagaggaaatatatattctctgtaagaatggccctagtaaattgccttaaaactttgcttgaggctgatccttattcaaaatgggccattcttaatgtaatgggaaaagactttcctgtaaatgaagtatttacacaatttcttgctgacaatcatcaccaagttcgcatgttggctgcagagtcaatcaatagattgttccaggacacgaagggagattcttccaggttactgaaagcacttcctttgaagcttcagcaaacagcttttgaaaatgcatacttgaaagctcaggaaggaatgagagaaatgtcccatagtgctgagaaccctgaaactttggatgaaatttataatagaaaatctgttttactgacgttgatagctgtggttttatcctgtagccctatctgcgaaaaacaggctttgtttgccctgtgtaaatctgtgaaagagaatggattagaacctcaccttgtgaaaaaggttttagagaaagtttctgaaacttttggatatagacgtttagaagactttatggcatctcatttagattatctggttttggaatggctaaatcttcaagatactgaatacaacttatcttcttttccttttattttattaaactacacaaatattgaggatttctatagatcttgttataaggttttgattccacatctggtgattagaagtcattttgatgaggtgaagtccattgctaatcagattcaagaggactggaaaagtcttctaacagactgctttccaaagattcttgtaaatattcttccttattttgcctatgagggtaccagagacagtgggatggcacagcaaagagagactgctaccaaggtctatgatatgcttaaaagtgaaaacttattgggaaaacagattgatcacttattcattagtaatttaccagagattgtggtggagttattgatgacgttacatgagccagcaaattctagtgccagtcagagcactgacctctgtgacttttcaggggatttggatcctgctcctaatccacctcattttccatcgcatgtgattaaagcaacatttgcctatatcagcaattgtcataaaaccaagttaaaaagcattttagaaattctttccaaaagccctgattcctatcagaaaattcttcttgccatatgtgagcaagcagctgaaacaaataatgtttataagaagcacagaattcttaaaatatatcacctgtttgttagtttattactgaaagatataaaaagtggcttaggaggagcttgggcctttgttcttcgagacgttatttatactttgattcactatatcaaccaaaggccttcttgtatcatggatgtgtcattacgtagcttctccctttgttgtgacttattaagtcaggtttgccagacagccgtgacttactgtaaggatgctctagaaaaccatcttcatgttattgttggtacacttataccccttgtgtatgagcaggtggaggttcagaaacaggtattggacttgttgaaatacttagtgatagataacaaggataatgaaaacctctatatcacgattaagcttttagatccttttcctgaccatgttgtttttaaggatttgcgtattactcagcaaaaaatcaaatacagtagaggacccttttcactcttggaggaaattaaccattttctctcagtaagtgtttatgatgcacttccattgacaagacttgaaggactaaaggatcttcgaagacaactggaactacataaagatcagatggtggacattatgagagcttctcaggataatccgcaagatgggattatggtgaaactagttgtcaatttgttgcagttatccaagatggcaataaaccacactggtgaaaaagaagttctagaggctgttggaagctgcttgggagaagtgggtcctatagatttctctaccatagctatacaacatagtaaagatgcatcttataccaaggcccttaagttatttgaagataaagaacttcagtggaccttcataatgctgacctacctgaataacacactggtagaagattgtgtcaaagttcgatcagcagctgttacctgtttgaaaaacattttagccacaaagactggacatagtttctgggagatttataagatgacaacagatccaatgctggcctatctacagccttttagaacatcaagaaaaaagtttttagaagtacccagatttgacaaagaaaacccttttgaaggcctggatgatataaatctgtggattcctctaagtgaaaatcatgacatttggataaagacactgacttgtgcttttttggacagtggaggcacaaaatgtgaaattcttcaattattaaagccaatgtgtgaagtgaaaactgacttttgtcagactgtacttccatacttgattcatgatattttactccaagatacaaatgaatcatggagaaatctgctttctacacatgttcagggatttttcaccagctgtcttcgacacttctcgcaaacgagccgatccacaacccctgcaaacttggattcagagtcagagcactttttccgatgctgtttggataaaaaatcacaaagaacaatgcttgctgttgtggactacatgagaagacaaaagagaccttcttcaggaacaatttttaatgatgctttctggctggatttaaattatctagaagttgccaaggtagctcagtcttgtgctgctcactttacagctttactctatgcagaaatctatgcagataagaaaagtatggatgatcaagagaaaagaagtcttgcatttgaagaaggaagccagagtacaactatttctagcttgagtgaaaaaagtaaagaagaaactggaataagtttacaggatcttctcttagaaatctacagaagtataggggagccagatagtttgtatggctgtggtggagggaagatgttacaacccattactagactacgaacatatgaacacgaagcaatgtggggcaaagccctagtaacatatgacctcgaaacagcaatcccctcatcaacacgccaggcaggaatcattcaggccttgcagaatttgggactctgccatattctttccgtctatttaaaaggattggattatgaaaataaagactggtgtcctgaactagaagaacttcattaccaagcagcatggaggaatatgcagtgggaccattgcacttccgtcagcaaagaagtagaaggaaccagttaccatgaatcattgtacaatgctctacaatctctaagagacagagaattctctacattttatgaaagtctcaaatatgccagagtaaaagaagtggaagagatgtgtaagcgcagccttgagtctgtgtattcgctctatcccacacttagcaggttgcaggccattggagagctggaaagcattggggagcttttctcaagatcagtcacacatagacaactctctgaagtatatattaagtggcagaaacactcccagcttctcaaggacagtgattttagttttcaggagcctatcatggctctacgcacagtcattttggagatcctgatggaaaaggaaatggacaactcacaaagagaatgtattaaggacattctcaccaaacaccttgtagaactctctatactggccagaactttcaagaacactcagctccctgaaagggcaatatttcaaattaaacagtacaattcagttagctgtggagtctctgagtggcagctggaagaagcacaagtattctgggcaaaaaaggagcagagtcttgccctgagtattctcaagcaaatgatcaagaagttggatgccagctgtgcagcgaacaatcccagcctaaaacttacatacacagaatgtctgagggtttgtggcaactggttagcagaaacgtgcttagaaaatcctgcggtcatcatgcagacctatctagaaaaggcagtagaagttgctggaaattatgatggagaaagtagtgatgagctaagaaatggaaaaatgaaggcatttctctcattagcccggttttcagatactcaataccaaagaattgaaaactacatgaaatcatcggaatttgaaaacaagcaagctctcctgaaaagagccaaagaggaagtaggtctccttagggaacataaaattcagacaaacagatacacagtaaaggttcagcgagagctggagttggatgaattagccctgcgtgcactgaaagaggatcgtaaacgcttcttatgtaaagcagttgaaaattatatcaactgcttattaagtggagaagaacatgatatgtgggtattccgactttgttccctctggcttgaaaattctggagtttctgaagtcaatggcatgatgaagagagacggaatgaagattccaacatataaatttttgcctcttatgtaccaattggctgctagaatggggaccaagatgatgggaggcctaggatttcatgaagtcctcaataatctaatctctagaatttcaatggatcacccccatcacactttgtttattatactggccttagcaaatgcaaacagagatgaatttctgactaaaccagaggtagccagaagaagcagaataactaaaaatgtgcctaaacaaagctctcagcttgatgaggatcgaacagaggctgcaaatagaataatatgtactatcagaagtaggagacctcagatggtcagaagtgttgaggcactttgtgatgcttatattatattagcaaacttagatgccactcagtggaagactcagagaaaaggcataaatattccagcagaccagccaattactaaacttaagaatttagaagatgttgttgtccctactatggaaattaaggtggaccacacaggagaatatggaaatctggtgactatacagtcatttaaagcagaatttcgcttagcaggaggtgtaaatttaccaaaaataatagattgtgtaggttccgatggcaaggagaggagacagcttgttaagggccgtgatgacctgagacaagatgctgtcatgcaacaggtcttccagatgtgtaatacattactgcagagaaacacggaaactaggaagaggaaattaactatctgtacttataaggtggttcccctctctcagcgaagtggtgttcttgaatggtgcacaggaactgtccccattggtgaatttcttgttaacaatgaagatggtgctcataaaagatacaggccaaatgatttcagtgcctttcagtgccaaaagaaaatgatggaggtgcaaaaaaagtcttttgaagagaaatatgaagtcttcatggatgtttgccaaaattttcaaccagttttccgttacttctgcatggaaaaattcttggatccagctatttggtttgagaagcgattggcttatacgcgcagtgtagctacttcttctattgttggttacatacttggacttggtgatagacatgtacagaatatcttgataaatgagcagtcagcagaacttgtacatatagatctaggtgttgcttttgaacagggcaaaatccttcctactcctgagacagttccttttagactcaccagagatattgtggatggcatgggcattacgggtgttgaaggtgtcttcagaagatgctgtgagaaaaccatggaagtgatgagaaactctcaggaaactctgttaaccattgtagaggtccttctatatgatccactctttgactggaccatgaatcctttgaaagctttgtatttacagcagaggccggaagatgaaactgagcttcaccctactctgaatgcagatgaccaagaatgcaaacgaaatctcagtgatattgaccagagtttcaacaaagtagctgaacgtgtcttaatgagactacaagagaaactgaaaggagtggaagaaggcactgtgctcagtgttggtggacaagtgaatttgctcatacagcaggccatagaccccaaaaatctcagccgacttttcccaggatggaaagcttgggtgtgatcttcagtatatgaattaccctttcattcagcctttagaaattatattttagcctttatttttaacctgccaacatactttaagtagggattaatatttaagtgaactattgtgggtttttttgaatgttggttttaatacttgatttaatcaccactcaaaaatgttttgatggtcttaaggaacatctctgctttcactctttagaaataatggtcattcgggctgggcgcagcggctcacgcctgtaatcccagcactttgggaggccgaggtgagcggatcacaaggtcaggagttcgagaccagcctggccaagagaccagcctggccagtatggtgaaaccctgtctctactaaaaatacaaaaattagccgagcatggtggcgggcacctgtaatcccagctactcgagaggctgaggcaggagaatctcttgaacctgggaggtgaaggttgctgtgggccaaaatcatgccattgcactccagcctgggtgacaagagcgaaactccatctcaaaaaaaaaaaaaaaaaaacagaaacgtatttggatttttcctagtaagatcactcagtgttactaaataatgaagttgttatggagaacaaatttcaaagacacagttagtgtagttactatttttttaagtgtgtattaaaacttctcattctattctctttatcttttaagcccttctgtactgtccatgtatgttatctttctgtgataacttcatagattgccttctagttcatgaattctcttgtcagatgtatataatctcttttaccctatccattgggcttcttctttcagaaattgtttttcatttctaattatgcatcatttttcagatctctgtttcttgatgtcatttttaatgtttttttaatgttttttatgtcactaattattttaaatgtctgtacttgatagacactgtaatagttctattaaatttagttcctgctgtttatatctgttgatttttgtatttgataggctgttcatccagttttgtctttttgaaaagtgagtttattttcagcaaggctttatctatgggaatcttgagtgtctgtttatgtcatattcccagggctgttgctgcacacaagcccattcttattttaatttcttggctttagggtttccatacctgaagtgtagcataaatactgataggagatttcccaggccaaggcaaacacacttcctcctcatctccttgtgctagtgggcagaatatttgattgatgcctttttcactgagagtataagcttccatgtgtcccacctttatggcaggggtggaaggaggtacatttaattcccactgcctgcctttggcaagccctgggttctttgctccccatatagatgtctaagctaaaagccgtgggttaatgagactggcaaattgttccaggacagctacagcatcagctcacatattcacctctctggtttttcattcccctcatttttttctgagacagagtcttgctctgtcacccaggctggagtgcagtggcatgatctcagctcactgaaacctctgcctcctgggttcaagcaattctcctgcctcagcctcccgagtagctgggactacaggcgtgtgccaacacgcccggctaattttttgtatttttattagagacggagtttcaccgtgttagccaggatggtctcgatcgcttgacctcgtgatccaccctcctcggcctcccaaagtgctgggattacaggtgtgagccaccgcgcccggcctcattcccctcatttttgaccgtaaggatttcccctttcttgtaagttctgctatgtatttaaaagaatgttttctacattttatccagcatttctctgtgttctgttggaagggaagggcttaggtatctagtttgatacataggtagaagtggaacatttctctgtcccccagctgtcatcatataagataaacatcagataaaaagccacctgaaagtaaaactactgactcgtgtattagtgagtataatctcttctccatccttaggaaaatgttcatcccagctgcggagattaacaaatgggtgattgagctttctcctcgtatttggaccttgaaggttatataaatttttttcttatgaagagttggcatttctttttattgccaatggcaggcactcattcatatttgatctcctcaccttcccctcccctaaaaccaatctccagaactttttggactataaatttcttggtttgacttctggagaactgttcagaatattactttgcatttcaaattacaaacttaccttggtgtatctttttcttacaagctgcctaaatgaatatttggtatatattggtagttttattactatagtaaatcaaggaaatgcagtaaacttaaaatgtctttaagaaagccctgaaatcttcatgggtgaaattagaaattatcaactagataatagtatagataaatgaatttgtagctaattcttgctagttgttgcatccagagagctttgaataacatcattaatctactctttagccttgcatggtatgctatgaggctcctgttctgttcaagtattctaatcaatggctttgaaaagtttatcaaatttacatacagatcacaagcctaggagaaataactaattcacagatgacagaattaagattataaaagattttttttttgtaattttagtagagacagggttgccattgtattccagccttggcgacagagcaagactctgcctcaaaaaaaaaaaaaaaaaggttttggcaagctggaactctttctgcaaatgactaagatagaaaactgccaaggacaaatgaggagtagttagattttgaaaatattaatcatagaatagttgttgtatgctaagtcactgacccatattatgtacagcatttctgatctttactttgcaagattagtgatactatcccaatacactgctggagaaatcagaatttggagaaataagttgtccaaggcaagaagatagtaaattataagtacaagtgtaatatggacagtatctaacttgaaaagatttcaggcgaaaagaatctggggtttgccagtcagttgctcaaaaggtcaatgaaaaccaaatagtgaagctatcagagaagctaataaattatagactgcttgaacagttgtgtccagattaagggagataatagctttcccaccctactttgtgcaggtcatacctccccaaagtgtttacctaatcagtaggttcacaaactcttggtcattatagtatatgcctaaaatgtatgcacttaggaatgctaaaaatttaaatatggtctaaagcaaataaaagcaaagaggaaaaactttggacagcgtaaagactagaatagtcttttaaaaagaaagccagtatattggtttgaaatatagagatgtgtcccaatttcaagtattttaattgcaccttaatgaaattatctattttctatagattttagtactattgaatgtattactttactgttacctgaatttattataaagtgtttttgaataaataattctaaaagc

SEQ ID NO: 21 - DNA, 1500 bp, Homo sapiens
tccctcctcaaatgaaggtaaaactagggctagaaaacgttcaactaatttaaggcaattaaccctctgaaatttttcgctgatcaaaggaacaggaattgctgttttaaaatatgcaactggcatttcacacctctacactggacgacgtattgcgtggaggatggagaaggaagatcacccctactcccaaattcgtagttataagggcgggttattagaagggcgccaggaaggtctctctacaaagatggggggccggggaactccctatttgccctattttggtcccaacactgaaccaaggaaattgcgcccaaggttgaagcacacgcaatccgtccgtcatgcagacaaatgctctttcaggggtcctaattaagtgtggaggcctgactttccttccgaatccgccccaggtgttccaccccgagcttcccctcgggcttcccctcgccacgcagcctctgaagagaggagcatctacatacaaagaggcttaaactgcccagaacctccgaatgacgaagaatcaccgccagtctcaactcgtaagctgggaggcaaaaccccaaagcttccctaccaagggaaaacctttggcctcaaaggtccttctgtccagcatagccgggtccaataaccctccatcccgcgtccgcgcttacccaatacaagccgggctacgtccgagggtaacaacatgatcaaaaccacagcaggaaccacaataaggaacaagactcaggttaaagcaaacacagcgacagctcctgcgccgcatctcctggttccagtggcggcactgaactcgcggcaatttgtcccgcctctttcgcttcacggcagccaatcgcttccgccagagaaagaaaggcgccgaaatgaaacccgcctccgttcgccttcggaactgtcgtcacttccgtcctcagacttggaggggcggggatgaggagggcggggaggacgacgagggcgaagagggtgggtgagagccccggagcccgagccgaagggcgagccgcaaacgctaagtcgctggccattggtggacatggcgcaggcgcgtttgctccgacgggccgaatgttttggggcagtgttttgagcgcggagaccgcgtgatactggatgcgcatgggcataccgtgctctgcggctgcttggcgttgcttcttcctccagaagtgggcgctgggcagtcacgcagggtttgaaccggaagcgggagtaggtagctgcgtggctaacggagaaaagaagccgtggccgcgggaggaggcgagaggagtcgggatctgcgctgcagccaccgccgcggttgatactactttgaccttccgagtgcagtggtaggggcgcggaggcaacgcagcggcttctgcgctgggaaattcagtcgtgtgcgacccagtctgtcctctccccagaccgccaatctcatgcacccctccagagtggcccttgactcctccctctcctcactccatctttcct

SEQ ID NO: 22 - DNA, 1355 bp, Homo sapiens
taaactgcccagaacctccgaatgacgaagaatcaccgccagtctcaactcgtaagctgggaggcaaaaccccaaagcttccctaccaagggaaaacctttggcctcaaaggtccttctgtccagcatagccgggtccaataaccctccatcccgcgtccgcgcttacccaatacaagccgggctacgtccgagggtaacaacatgatcaaaaccacagcaggaaccacaataaggaacaagactcaggttaaagcaaacacagcgacagctcctgcgccgcatctcctggttccagtggcggcactgaactcgcggcaatttgtcccgcctctttcgcttcacggcagccaatcgcttccgccagagaaagaaaggcgccgaaatgaaacccgcctccgttcgccttcggaactgtcgtcacttccgtcctcagacttggaggggcggggatgaggagggcggggaggacgacgagggcgaagagggtgggtgagagccccggagcccgagccgaagggcgagccgcaaacgctaagtcgctggccattggtggacatggcgcaggcgcgtttgctccgacgggccgaatgttttggggcagtgttttgagcgcggagaccgcgtgatactggatgcgcatgggcataccgtgctctgcggctgcttggcgttgcttcttcctccagaagtgggcgctgggcagtcacgcagggtttgaaccggaagcgggagtaggtagctgcgtggctaacggagaaaagaagccgtggccgcgggaggaggcgagaggagtcgggatctgcgctgcagccaccgccgcggttgatactactttgaccttccgagtgcagtggtaggggcgcggaggcaacgcagcggcttctgcgctgggaaattcagtcgtgtgcgacccagtctgtcctctccccagaccgccaatctcatgcacccctccagagtggcccttgactcctccctctcctcactccatctttcctggcctctctccgggtgcttagcggacttggccaataacctcctccttttaaacgccctgaattgaaccctgcctcctgcgcatcctctttttgtgtcaccttagggttcagatttaactacgcgacttgactagtcatcttttgatctctctctcgtatttagtacttttagtcagcgagcatttattgatatttcaacttcagcctcgcggttaagagcttgggctctggaatcatacggctggaattggaattctgtcagtcgtgtggccgctctctactgtcttgtgaagataagtgagataatcttgacctgtggtgagcactcgtgagcgttagctgctgtatttaccag

SEQ ID NO: 23 - DNA, 1102 bp, Homo sapiens
agctctgcctcccagattcaagcgattctcctgcctcagcctcctgagtagctgggattacaggcgcgcgccaccaagcccggctaatttttgtatttttagtagagacagggtttcaccatgttggtcaggctggtcgaactcctgaccttgtgatcctcccaccttggcctcccaaagtgctgggattacaggcgtgagccactgcgtccagtgtaaattatacttttattttaatcctgctactactgcaagcaaggcaaacatttttgtgttacagcattacttgtatagattttaagaaaatctcattttaaatacggaaatgttaagaaaaattattgtgcctttgaccagaatgtgcctctaattgtacagttaaatctaactataaatactgcagtataaaataattatatacacattttttcacacctctttctctctatatatgcatatatacatatacatatatatacctatatgtattttttttacagacagtgatgtgtgttctgaaattgtgaaccatgagtctagtacttaatgatctgcttatctgctgccgtcaactagaacatgatagagctacagaacgaaaggtagtaaattacttaaattcaatttttccttgaaataagtgtgattagtaacccattattatttcctttttattttcagaaagaagttgagaaatttaagcgcctgattcgagatcctgaaacaattaaacatctagatcggcattcagattccaaacaaggaaaatatttgaattgggatgctgtttttaggtattctattcaaatttattttactgtctttatttttctctttcatatttatttctgttgtgatattacttttgtgtgtaagtcttaacatttatctttgcttcctatatatcattatgccttgcatatgaatttggcatttaatatttatccaaaacataatttttaaaggttgttcatatagaaacttaaaaattataaattatttcttcaataaaatgttttagacatatctcactcaaaattgagagagaatttctttcattttagttagttcacaagacttcagattagaggaaaaaattata

SEQ ID NO: 24 - DNA, 1113 bp, Homo sapiens
gctgggattacaggcgtgagccactgcgtccagtgtaaattatacttttattttaatcctgctactactgcaagcaaggcaaacatttttgtgttacagcattacttgtatagattttaagaaaatctcattttaaatacggaaatgttaagaaaaattattgtgcctttgaccagaatgtgcctctaattgtacagttaaatctaactataaatactgcagtataaaataattatatacacattttttcacacctctttctctctatatatgcatatatacatatacatatatatacctatatgtattttttttacagacagtgatgtgtgttctgaaattgtgaaccatgagtctagtacttaatgatctgcttatctgctgccgtcaactagaacatgatagagctacagaacgaaaggtagtaaattacttaaattcaatttttccttgaaataagtgtgattagtaacccattattatttcctttttattttcagaaagaagttgagaaatttaagcgcctgattcgagatcctgaaacaattaaacatctagatcggcattcagattccaaacaaggaaaatatttgaattgggatgctgtttttaggtattctattcaaatttattttactgtctttatttttctctttcatatttatttctgttgtgatattacttttgtgtgtaagtcttaacatttatctttgcttcctatatatcattatgccttgcatatgaatttggcatttaatatttatccaaaacataatttttaaaggttgttcatatagaaacttaaaaattataaattatttcttcaataaaatgttttagacatatctcactcaaaattgagagagaatttctttcattttagttagttcacaagacttcagattagaggaaaaaattataataaatgttaggatattattttcacacctttaaatattactctgattataagtaaatgctgtgtgttaaattgtaataaaacaagtaaaaggaagattggaatacttgtgtatgaatttggttaaaaacaaaaaatacctcgaacaatgaaaaaacacaactgattgctggacaggagtggcaaacagggtt

SEQ ID NO: 25 - DNA, 1146 bp, Homo sapiens
attttaaataccacaaatataattacaacctgaagatgaatactattttgtataagctgatctggtaggtcaaatatgcacccagcattcctggctagttatgaatatcttctaggcaggcttaatttattggctggcaacattaccaactgcctaagaaacaggtagatcctgtacagaataacagaaggagttgagagaggattgagagggtccttactagcattgtaagcttttaatgacaaatttagaaaacaggcagtaaagcaatagaaagtcatagaagattaagagctttgcagaccagatattaaattggtcttgtaggagttaggccttgaaagagagatttaattgttttatttgtttttttcagctgatgtagtaatctaagcaaggtggtttaaaagttgctctttgtgatggcatgaacagcttttgaaattattataatttaagtattcaacgagtttctgaaattgcattttgttttcttgaagatttttacagaaatatattcagaaagaaacagaatgtctgagaatagcaaaaccaaatgtatcagcctcaacacaagcctccaggcagaaaaagatgcaggaaatcagtagtttggtcaaatacttcatcaaatgtgcaaacagaagtaagtgatgttataaattataaataaatggcttaacagattactgtcgcgtgagttttttttttttttcagatcattttaaggacttaactgttgcataagtttgttctaaatagaataagataaaagttgagtgtaagtacatataatgatttttatttttattaaaaggtttttttttagggctagtcaagtgaagcagtgggagtttagaaggaacaaagaaatctgtaactggttgtgatcaattcgttgtaaacaccactgcactcaggccagcctgatttttaatattacaagttcaaatatttggggaaatttatgcaagcatagaatgacagaaatctgaggattgaagggatttatttatttaagagatagggtgtcactctgtcacccaggctggagtgcaatggtgtgatgatagctcactgcaggctgaagcttctctgttcctaagtgatcctcctgtcttggcttcctagtagctaggactacag

SEQ ID NO: 26 - DNA, 1165 bp, Homo sapiens
gcctctagtctcagctacttggaggctgaggtgggagaattacttgaacccaggaggtggaggctgcagtgtgctgagtttgtgccactgcactccagcctgggtgacagaccaagattccatctcaaaaaaaaaaaaaaaagaatgattgtttttgctatatattcctataaaagaggcgttggcaaacttactgtgtaaagaggccagatagtaaatgttcttgactttataggccatgtggtcacctctgtcttaattacaaaagcagccataaacaataagtaaatgaatggttgtgactatgttccaataaaatgttatttgcaaagaaaaaaaaaatgaattttgcttggggccataatttgccaatttcttctctacaaaagaagtttagttaatagtaatttcccaaatggaattatttaaatagttgccattccaagtgtcttatttttgttcaaatttatgtttttctttatttgtttattttgaaataggagcacctaggctaaaatgtcaagaactcttaaattatatcatggatacagtgaaagattcatctaatggtgctatttacggagctgattgtagcaacatactactcaaagacattctttctgtgagaaaatactggtgtgaaatatctcagcaacagtggttaggtatgttttgaaggttgttgtttgtgaatttttcctcatgaaatgaaacttcaccaaagaaagcactctgtctgtatctgtctatatcccccaagtgacctgacagtttaacagtactttagtaaaattatatggttatcgaactgacccttaatttttatttattatgtagcttttgaataaagtcatgaataatatatcaggtgcctgatatcagagccggaattacagttgaaaaataccatctccatcgtcaaggagttgacagtggcagaagaaaacccaagtaaaccagagttcataatgtgctgtgatacagacatatttgggttcagtaggtatacaaaacaatgacacctaaactcaaccatgatttaagtagaaagggagaaaaccaagagagggaagtaccataaaagtgaaagcaggcagggtgcagtggctcacgcctgtaatcctagcactttgggaggccaaggccggtggattgcttgagctca

SEQ ID NO: 27 - DNA, 1166 bp, Homo sapiens
cagtacaaaaattagccaggcatggttttgtgcgcctgtggtcccagctacttgggagactgaggcatgagaatcacttgaacccaggaggcagaggttgcagtgagccaagattgcaccattgcactccagcctggacgacagagcaagattctgtctcaaaaaacagaagaaagaaaaacccatggagcatgtactgtaagtgctttcttaggcctagatgatggaacagaggcttagagaagttaagtaatgtttctgcgacctggctcttaaactggtgctctcacagcagtttatagttattcctgtcttaaaggcattttatataagataaaattaaatactgatggagtacttttactatgttaaaaataaattagtgcagttttaaaatcctttttctgtatgggattatggaatatttaagttaaattgtaacatttaatacattttgatttttaaaaaatcatgactaataatttttttttttttttaagaattgttctctgtgtacttcaggctctatctgaaaccttcacaagatgttcatagagttttagtggctagaataattcatgctgttaccaaaggatgctgttctcagactgacggattaaattccaaatttttggactttttttccaaggctattcagtgtgcgaggtaatctaatctctttttcttttgttttgtattgaaatacttttgatcttgcaagaccatgttttagactcagtaactaaaaattctaccttaaaataaaacattgatccatcataacagaactagtggattcctaaagagacaaccaagtccaacactttctgaatatccaatatgcagaacactacgtgaagttttcaagggggagatgtgtcttgctgatgttctgttgaccaggaaagttaaatatcctctaagtcattgcatttcccccattttgaggatggttttaatataccgagaataaaataaaataggaaaatattttggaagtattactgttgtacattagtatggcagtactcaatgtataatgtgaaacattttataaatggtgttacaaatcagttttgtttatttttatacaatgttttagcaggagggagagctaacagaagtggtctcttaacaccaaataagaactaattttttgtcagtgt

SEQ ID NO: 28 - DNA, 1239 bp, Homo sapiens
ccaatatgcagaacactacgtgaagttttcaagggggagatgtgtcttgctgatgttctgttgaccaggaaagttaaatatcctctaagtcattgcatttcccccattttgaggatggttttaatataccgagaataaaataaaataggaaaatattttggaagtattactgttgtacattagtatggcagtactcaatgtataatgtgaaacattttataaatggtgttacaaatcagttttgtttatttttatacaatgttttagcaggagggagagctaacagaagtggtctcttaacaccaaataagaactaattttttgtcagtgtgaagtaatgctgtgatttttttttttaatgaatagttttgaaattaagactactgtttgaaaattagggttttgtttttttttctttcagcataccacttcataactgttcagtttgtacagtttgttccccctgttatacccagttgagcttgtttgtttcttcacagacaagaaaagagctcttcaggtctaaatcatatcttagcagctcttactatcttcctcaagactttggctgtcaactttcgaattcgagtgtgtgaattaggagatgaaattcttcccactttgctttatatttggactcaacataggcttaatgattctttaaaagaagtcattattgaattatttcaactgcaaatttatatccatcatccgaaaggagccaaaacccaagaaaaaggtataaaggaaatgtttactgttttgaatttgcttcttcattcaaacatagaagtctaagtataaaattagtgttctttaggaggatatgactttcctctggatttctctggttgataatgttacttagccatgagaatgtttttcatagagtttttagaatttgaagcagtggtagcagattctgttatgcctttctatttgttcaatacaatattaggtattatgggaaatacaaaaaaatctgagacattgttccctctaggagctacttatgcatcaatacttagatactaaggggtctgacacagactgtagggcaaaagaatttaaagaaagcaggatcttgtttatccacctattacttttattagaagataaaatacgtaaattggactaaaaccagtcagattattcagctcctgaggaagatacatacatattactttaataggaatttgaggcagaaacagggaaattgctgccttaagcctcatagtt

SEQ ID NO: 29 - DNA, 1164 bp, Homo sapiens
ctagtcaagccacagttggattaccatgttcaccagattttgtatagtcagcattttaagttgactggaatgtgtcttgggaaagatgactgaaatggtgagaagtctgaataatatgtcatttttacactagttgaaggaactcgtaatatttttctcttaggccagaaaaaggcatacggagaacttggtcctcatatgaaagagggaacatattaattgtatttgcctcaggtgggagaataaattggagaaagacagattttaggtcagaatatggaagaaatttataagaaacacagttatctaaatgtaaaatggacagttatgaaatagagtttgtcaaggatcttgtcagaagaggcattagtactgaatggaaggttggaccaggtgtcttctaacgctgatgcagcttgacagctgaataattttgtgggagctagcagtgtaaacagagtacatacataaaaattacattttaattttttggattacaggtgcttatgaatcaacaaaatggagaagtattttatacaacttatatgatctgctagtgaatgagataagtcatataggaagtagaggaaagtattcttcaggatttcgtaatattgccgtcaaagaaaatttgattgaattgatggcagatatctgtcaccaggtacagtaagtaggtcatgtcacatttagaaatttcctgttaattttttttttaaactgggcattttgggcttttaaaacctgtgttctcacaaaaagcctataaaatgactctgtacatgcaactattcctttcaaactatcagaaatatttggaattacccttttaacttaaaagttaatgcttttgcagatatttgaaaactaacaatgaactttttcattcttaaatgattgtctctaggaaataaggtgaccctaaccctaatgattcgattcgactcgactgtattctacaaagtgctgggattacaggcatgagccaccaagcccagtctgtttcttttttgcaattaagctagagttcacatagcataaaattcacgattttgagttgtacatttcagtggtttttagtatttttactatgttgtacaaccatcatcactaattctggaaactttttttattttatttttatttttttgagatggagtcttg

SEQ ID NO: 30 - DNA, 1170 bp, Homo sapiens
taaagtgccattactgtcatgcaaaatgtttgtttcttactatgttatcagatttatatgtttctgtaatgtattactcttgctttatgagttccctgtatcttcatttcagaaagaattttttttccccctaatgaaatattagaagacaatagcaatgaaaaaagtgtatttggccaggcgtggtggctcacacctgtaatcccagcactttgggaggccaaggcgggcagatcacctgaggttgggagttcaagaccagtctgaccaacatggagaaactctgtccctactaaaaatacaaagttagctgggcatggtggtgcaagcctgtaatcccagctactcgggaggctgaggcaggagaatcacttgaacctgggaggtagaggttgtggtgatacgagatcgtgctgttccactccaacctgggcaacaacagcgaaactctggctcaaaaaaaaaaaaaagaaaaaagtggatttatttttattttacaggtttttaatgaagataccagatccttggagatttctcaatcttacactactacacaaagagaatctagtgattacagtgtcccttgcaaaaggaagaaaatagaactaggctgggaagtaataaaagatcaccttcagaagtcacagaatgattttgatcttgtgccttggtaaagtgttaccattttctcattcagtgtcattttaatctcttgtatgttatttttcagaaaactttcagtggaatcctttcatctcaaccagaactaagtcatttgtctacccccaaacctattactagcaaagggatatgtgattgccatgacaaatgagatcaatcattaatggctcatttgcttgggccaagtgcagggccacctattttaatcatattgtcatagcaagttaagaaggaggactggctctctgataggcaattagaagtgtgcacctcatggaattcactgaattgtacgcttcaacaatagattttagcatacgtagcaccttctaatagaattaggaagaagttaaagataatcttaagaaatcacagaataattttgaccttatgccatgataaaaagttattttctcttattttctatcttctttattctcatgtaacgttcacatatatttaagtaatcaaataaattatggatacttt

SEQ ID NO: 31 - DNA, 1372 bp, Homo sapiens
ggagtgcagtggcacaatcttggctcactacaacctccacctcccaggttcaagcagttatcctgcctcagcgtcctgagtagctgggattccaggcatgtgccaccatgcccggctaatttttgtatttttagtagagactgggtttcaccatgttggccaggctggtctcaaactcctaacctcgtgatctgcctgccttggcctcccaaagtgctgggaaaccacctggcccaaatattgctaatttaatatcctttaaaatatttgtttaagggaaacttaacagcttacccagctagccaaacgttgacaattttcctgccaatttaggaagtaggacatagtaactattaacagccagtttatttttagagtactatggaaatgatggtgattctctaattaggatattgtaagagtaccatgtctatatatttccttttagtttgttaatgtgatggaatagttttcaaattatcctttttttttttttttaggctacagattgcaacccaattaatatcaaagtatcctgcaagtttacctaactgtgagctgtctccattactgatgatactatctcagcttctaccccaacagcgacatggggaacgtacaccatatgtgttacgatgccttacggaagttgcattgtgtcaagacaagaggtcaaacctagaaagctcacaaaagtcagatttattaaaactctggaataaaatttggtgtattacctttcgtggtataagttctgagcaaatacaagctgaaaactttggcttacttggagccataattcagggtagtttagttgaggttgacagagaattctggaagttatttactgggtcagcctgcagaccttcatggtaagttcagcatgcattatgtctgacttacagataaacacacacagacacacacacactcacatatccctgatcattttcatagtttgttacttcagttaaagatgtcaaattctatttcagatgcttttcttgtttggccgagaagacttaataaatgcataagtgaatttagtttcaaatgttgacaaattattaaagactaatgttaaggaatttcttttttagttaaaaaatttttaattgatctataatagagttatatattatcaaggtacatgtgataatttgacacactcatatgacacactcatgtagggtgatgggatatcagcaccctacgtatcttttcttcatgctaggaacgtttgaattattctcttcttgctgtttggaaatgtacaatagattaatgttaaccgtagtcaccctactgatgtatcggacaccaggtcttattccttctaattgtatacgtgtatccaaaagactttctttaa

SEQ ID NO: 32 - DNA, 1195 bp, Homo sapiens
tattatcaaggtacatgtgataatttgacacactcatatgacacactcatgtagggtgatgggatatcagcaccctacgtatcttttcttcatgctaggaacgtttgaattattctcttcttgctgtttggaaatgtacaatagattaatgttaaccgtagtcaccctactgatgtatcggacaccaggtcttattccttctaattgtatacgtgtatccaaaagactttctttaaagaattatgaagagtttaaatttcttttatgtgcaatttatcattatttattaaatagccatgtttaaattgtagtactatgcactgttaataaacgagctattttttaatcaagaatcttcccaaatgtaatcagacttttaacagtttttatgttcatttagtcaccttaactaaatgtatgtgccaggcactgtcctgatagataaagtctttgcccctccaatagcttgcttttcacaattgtcctttgttttgttatagtcctgcagtatgctgtttgactttggcactgaccaccagtatagttccaggaacggtaaaaatgggaatagagcaaaatatgtgtgaagtaaatagaagcttttctttaaaggaatcaataatgaaatggctcttattctatcagttagagggtgacttagaaaatagcacagaagtgcctccaattcttcacaggtaatttaagttcattagcatgctgctgttttttttgtttgttttatcaggctctctccacttatttgatgccagatggctttattttataataataatgcagaatttcccagatctaaccttaattattaaatattatgtttgtttttacagttatctgtgtctttatgcctgattgcttctgaaataaagggttgtctcactgtgagaatatgggggatgtgcatgaaaaatgcacatataattctttgagcatttatgtgttcctttctgattttttaaataagtaagtccatatatttgagtcatgtagatcctggatcctttctcataatgggagtgtcttttgggtaaaagatgttttatgaatgaggtgaggaaacgaggaagacaaaacaggatgtaagcactaggataaaggaatggagtccctcgtccacttaacctttccacagattggtaattggaaccaaatgattggagagcagacctccgaatgg

SEQ ID NO: 33 - DNA, 1096 bp, Homo sapiens
agtaagtccatatatttgagtcatgtagatcctggatcctttctcataatgggagtgtcttttgggtaaaagatgttttatgaatgaggtgaggaaacgaggaagacaaaacaggatgtaagcactaggataaaggaatggagtccctcgtccacttaacctttccacagattggtaattggaaccaaatgattggagagcagacctccgaatggatccaattaaagtacttttgctttaattttacaaccttttatttatttcagaaataatgttaaacatgctgtttctaaacagtattggaaatgataataacaatggttgtcctccttaaattgtccttttagatattaagaaatttagtatagatgaaagcaattttaatctaggatccaaattttagaagtcaagatttatagctaaacatggatgttaaagtttaaagtattctttacatggcttttggtcttctaagtgaagctttttgtttttctttgtagtaattttcctcatcttgtactggagaaaattcttgtgagtctcactatgaaaaactgtaaagctgcaatgaattttttccaaagcgtgccagaatggtatgttatctaataatgctctttatcattttaagctatagctttaattacaaagatgataattttagctgggtagtagctgcatcttaataattgtaaactaaattggtccaaaaaaattgcaactgttagccagggaagaggttgttttaattcagtgattgtaatctatgttatataacattagaccaagcttactattttttaatgctgtatagtataatatgtgacaagtgccaatgagaaaaactgaatggttatgctgggaaattaagaatataaaatttatatgaaataagttcttaaagatgttacccatttctgtacatcaactatgatttgactatttgttagctttaaaaactaatgataattgaaaacaaaaataaatctaaacctgagtttagttgattgactcaagagacttagattgtattgctgtgactgaaaatgactcactggcacaaacattccttatctccctcaagagggcaaaagga

SEQ ID NO: 34 - DNA, 1226 bp, Homo sapiens
gtttagttgattgactcaagagacttagattgtattgctgtgactgaaaatgactcactggcacaaacattccttatctccctcaagagggcaaaaggatgcgtaactgcttacctataccagatgttaaaggtttttaaacctatgctctttacttcctctgcttggtgaaaaaagggatatgtttgcagacaatgttatgcttaacatttatatctggtgtttttaaaaatactttctgaatttgcctttgagattgtaacttgtattttttctctatctattagtaaaatttgctactgaataatgacatttgatataagtaggtctcaaagtccgaagaagagaagcatttaaaagaataatctattaattatataagtagtctttgaatgatgtagatactaggttaatgttttcctttgtaatatattgctaatacatataaggcaaagcattaggtacttggtttatatattaaagatcttactttcttgaagtgaacaccaccaaaaagataaagaagaactttcattctcagaagtagaagaactatttcttcagacaacttttgacaagatggactttttaaccattgtgagagaatgtggtatagaaaagcaccagtccagtattggcttctctgtccaccagaatctcaaggaatcactggatcgctgtcttctgggattatcagaacagcttctgaataattactcatctgaggtgagattttttaaaaaaagaactaagcttatatatgattcaactttggtaaactgttaggaaggagaaataggggcaggaaaaacagcaaggatggtgggaggcttcattttaaaagcaaagtggcagtaaagggctctaaattggacaacttagcataattaaaggaaaactcaagaataataatttgagtacttcctttgtactggaaattatggtagacataaaataattccttgtgtaggttagtgaggaatagtaagagtttgagcatagggattatatgatgaaaaaaacctctaaatacaaaggagggaaatgttacagtaatagaaaagaacacgatgtaaacaaatctaatagattttggtggcatctgaagagagatgagtgattagtaaagacaataaatggactagcaattattttagacgtcatctaggaatttcctttagcctcaaaatcacgagttctcttcatgtatactattctcttgccaa

SEQ ID NO: 35 - DNA, 1126 bp, Homo sapiens
catgcccggccagctgtcaaaacttgtatctactagaaaaaatgttttatgctattctgtggagtctaaaaagctgaataagtcaaggttcctattcttcagaagcttaaaatgtcattttaatgtctctttatatgactgtaatttctacttgtgttctaagacttacagtcatttatttgcctgtgaagctttttttcttttctttcatccctacctcaaatatttaagggcctatgtgtacagtacaccctccaccctaagatgatatatcctgcttggccatcaggagatacttaggctatttttcttgagaatcctggttataattctacagtgatctcctagttgtttttagagctatccaggatatgccacctttaactcagttaactgaacttttgttttttaatatgtatgtagaatttgttcttacaaaagatagagtatactaaattatttatgaaatatatatatttttatttgtggtttactttaagattacaaattcagaaactcttgtccggtgttcacgtcttttggtgggtgtccttggctgctactgttacatgggtgtaatagctgaagaggaagcatataagtcagaattattccagaaagccaaggtaggagaatttatactaataaagtttcggataaatttgaatgaaatgtattcctgtgaaaattattacatttgtttggaagacattaaattttatgcaggttaaccctttctcttttatttatgtaatgtgagaagaaattatactatgtattttttaaattgttttaattgtttaatttttaattattattatactttaagttctggggtacatgatgtagagcatgcaggtttgttacatagatatacagtgccatggtggtttgctgcacccatcaactcgtcatctgcattaggtacttctcctaatgttatccctcccctagcccccgaccccctgtcaggccctggtgtataatgttcccctccctgtgtccatgtgttctcattgttcagctgccacttatgagtgagaacatgcagtgtttgtttttctgttcttgtgttagtttgctgggaatgatggtttccagcttcatccatgtccctgcaaaggac

SEQ ID NO: 36 - DNA, 1126 bp, Homo sapiens
tgtgcatgtgtctttatagtaaaatgatttataatcctttgtgtatatacccagtaatgggattgctgggtcaaatggtatttctagttctagatccttgaggaattgccacactgtcttccacaatgattgaactaatttacactcccaccaacagtgtaaaagcattcctgtttctccacatcctgtccagcatctgttgtttcctgactttttaatgataggctgtaagcatgaaactctttcttatctcttggtagtactctgtcactggtatgatttgcaagaacagagtataagatttgccattttaaaaaattgttaatgagttttgcttatactgtatgactacgtggaacttctaaaaacatttcattttttctcttaagtgcactttattttttattttatagtatgtccaagatcaaagtacactgtaaaaagcaatactaaactataattttaactggaatttgcatttttccttctattcacaatagtctctaatgcaatgtgcaggagaaagtatcactctgtttaaaaataagacaaatgaggaattcagaattggttccttgagaaatatgatgcagctatgtacacgttgcttgagcaactgtaccaaggtaagattttcttcttcttgttttgttttttgagataggatctttctctgtcacccaggctggagtgcagtgggattgtcacaactcattgtagccttgacctcctggtttccagcaattctcctgcctcagcctcccaagtaattgggactacaggcatgtaccacctagctaaaattttctttttacttgaaagtgtagcctatgcagggaattgatcactggttggtgttactgttttggtgtccactcgtaagtttattttttacttttatttttcttttttttgagacagtctctcactctttcacccagagtgagtgatcacatcactgcgatccagcagcctcgacctcctgggctcacagcagcctcgacctcctgggctcaagtgattctcccacctcagcctccttagtagctgggactacaagtgtacaccaccatgcctggctgatttttgtatttttgtaattttttgtattgatggggttttacac

SEQ ID NO: 37 - DNA, 1090 bp, Homo sapiens
ttgctcagatcaccttacataacatttggtagaaagagtgctactgtgtttaatctttgtttttatctgcagcagcctgtgggatagccaagccaggccccagagtattgataataattggaaatatatttcaaacctagtattaggtacatggccatatagcaatattatcaacatatttcttggttttgtaatgtgtttttcctcctttttggtgtaagtggggaaggagaaaagtagaataaactctaacctataattatagctcacttatctttagggtcaatagctgttactttaatgttgttaaagcacaatgaaagatgtacagtatagttattataactctaagaaaagatgtgtttttgaagcagcatatatattggccctaatagtaaactatttatctacattccattcaagatagagaaaacactgtctgccaagaataattgtttttatttctttgttgcttggttctttgtttgtcttaattgcagaagagtccaaataagattgcatctggctttttcctgcgattgttaacatcaaagctaatgaatgacattgcagatatttgtaaaagtttagtaagtatgcttcctgttttgctatcatattttgattctaataggcataatttttttgttgaaatatctttgtaaataaggatgcatctcacaacatatagctcttaacatttttacaaatgtggaaattaaggccaggtgcggtggctcatgcctgtaaccccagcactttgggaggccgaggtgggtggatcacaaggtcaggagattgagaccatcctggctaacacggtgaaaccccgtctctactaaaaatactaaaaattagccaggcgtggtgacatgtgcctgtagtcccagctactcgggaggctgaggcagaattgcttgaacctgggaggtggaggttgcagtgagcgaagatcgtgccactgcactccagcctaggcgacagagcgagactccatctcaaaaataaaaaaatttaaaaaattaaataaaatgtggaaattaaataatttgtcttgtggggaaatatacctgattgcttcttaatatca

SEQ ID NO: 38 - DNA, 1172 bp, Homo sapiens
tttgttatgtagacatattacaggttatatatccattttactattgttggacatttagtagaaaaagtactgtagttttcatacttacacatgaaccttgaattgtttgattaggtaaattttttttttttttttttttttgagacagagtctcgcttcgtcaaacccaggctggagtgcagtggcatgatctcagctcactgcaatctctgcctcctgagttcaagtgattctcctgcctcagcttcctgagtagctgggattacaggtgcccaccaccacacccagctaatttttgtattttaaatagagacaaggtttcaccatgttggccaggctggtttcgaactcccgacctcaggtgatccacctggctctgcctcccaaattgctgagattacagatgtgagccactgtgcccagcctgattaggtaaattttgactacagcatgctcctgcaagaagccatcttgaacatctttgtttctcttccttgaaggcatccttcatcaaaaagccatttgaccgtggagaagtagaatcaatggaagatgatactaatggaaatctaatggaggtggaggatcagtcatccatgaatctatttaacgattaccctgatagtagtgttagtgatgcaaacgaacctggagagagccaaagtaccataggtaaatacatatttactacttgggatttcttttacttctttatattgatttggcagtataagaggcctcattgatatcaattttgtgcttatttcattttctcttagtatagccttttaggattgttcctttcttatatactttattttttttttatttttacttgaatttattagtttcatattttattcttcatagaaggaacttaagataactattaaagaaataaaaccaggccaggcatggtggctcacgcttgtaatctcagcactttgggaggccaaggcgggctgatcatgaggtcaggagatcaagaccatcctggctaacgtggtgaaaccccatctctactaaaaacacaaaaattagatgggcgtggtggcgggcgcctgtagtcccagctactcgggaggctgaagcaggagaacggcatgaacctggggaggtggaggttgcagtgagccgagatcatgccactgcattccagcctgggcgacaga

SEQ ID NO: 39 - DNA, 1200 bp, Homo sapiens
aatgaaaacacacctgtaatgccattgcttttaacctttttctattatttctctgtagaaacattcaaaattgtagtcaacatcaacattcacatgttatgaatgcctgtttaattataagtatttttccaggtagttgcttttcttgatagtcatactttttaatggcttcaccatttttctgtcataaataccataatttacttgacattttttattgtcagaaatttagattcttttctattttcctacaataaacattattgcaatgatcatttgtctaagggtttttttttctcatattttaaattatttcttgacaacagaatcttggataatttttcaaaaagacttttgaagctttcagtatataattaatttcactataattttgcttttcatatacttttttttgtgaagaggaggaaatttgagttaatatgactatatatggctgttgtgcccttctcttagtgttaatgagtgctttttatttttaggtgccattaatcctttagctgaagaatatctgtcaaagcaagatctacttttcttagacatgctcaagttcttgtgtttgtgtgtaactactgctcagaccaatactgtgtcctttagggcagctgatattcggaggaaattgttaatgttaattgattctagcacgctagaacctaccaaatccctccacctgcatatggtgagttacgttaaatgaagaagctcttggattttatctgatgttgctgactaaatgtaatgagttgacatgtaagaatcacatggtgtctttgaagaattgaaattgctttcttgagaaatgaacctgagactagttggaaaataacacttttaacgtgctgtgagcaaatttaagtggatgctgaaatattaaaacttagatgggttttggatagatttattctctttaggtttaattgttataaattattttaattaggctaagaaacatagaccctgaatgtaaaaatattacataacattgtgtttgaagttggaaccttgcctttgaccttagtttatatattttcagttttttggatttgatttcaaaatgatagtgaagttacaagaatactacagttaacgttttaccatatttgcttaatcattccctctctccacacacacactcatacgcagatacacacatcattttctctgaaccattttgagatg

SEQ ID NO: 40 - DNA, 1083 bp, Homo sapiens
aggctgtggtactgggatttgaattttctgtttgacttcaaagccttttgtttttactatacacctcttaaatatttacagctgtgtgtgtgtgtgtatgtgtgtgcatgtatgaatttatgtttatatacttaaaaaaaatttttttttgagacggaatctcgctctgttgcccgggctggagtgcagtggcgcgatctcggctcactgcaaccttcgcctcccaggttcaagcgattctcctgcctcagcctcctgagtagctgggattataggcgcctgccaccacccctggctaatttttgtgtttttagtagagatggagtttcaccatattggccaggctgttctcaaactcctgaccttgtgatctgcctgcttcagcctcccaaagtgctgggattacaggtgtgagccactgcacccggcctatgtttatatactttttaaagtaaatgatttgtggataaacctgatttttttccctcctaccatcttagtatctaatgcttttaaaggagcttcctggagaagagtaccccttgccaatggaagatgttcttgaacttctgaaaccactatcgtaagaaattaaaaccttatgttatgttcactttaaagttataaaataactgatgtgttctgttaagcttataaagttgaactttttttttttttttaccacagcaatgtgtgttctttgtatcgtcgtgaccaagatgtttgtaaaactattttaaaccatgtccttcatgtagtgaaaaacctaggtcaaagcaatatggactctgagaacacaagggatgctcaaggacagtttcttacagtaattggagcattttggtaggtacagtctattttgtggtcctatttttcttttgctatctgtggatacgaatgcaagttttgtatccacatcagtgatttcttctgatcttcctacatagctaatacatcttttaagaatagcagaatgtaatttgtgtttccctcagtcgcttgaagaactacattgctttttgtttaaggcttggctttctaaaccgtttaactcatttctctgcaaattttgaatcacttaat

SEQ ID NO: 41 - DNA, 1156 bp, Homo sapiens
agtggcgcgatctcggctcactgcaaccttcgcctcccaggttcaagcgattctcctgcctcagcctcctgagtagctgggattataggcgcctgccaccacccctggctaatttttgtgtttttagtagagatggagtttcaccatattggccaggctgttctcaaactcctgaccttgtgatctgcctgcttcagcctcccaaagtgctgggattacaggtgtgagccactgcacccggcctatgtttatatactttttaaagtaaatgatttgtggataaacctgatttttttccctcctaccatcttagtatctaatgcttttaaaggagcttcctggagaagagtaccccttgccaatggaagatgttcttgaacttctgaaaccactatcgtaagaaattaaaaccttatgttatgttcactttaaagttataaaataactgatgtgttctgttaagcttataaagttgaactttttttttttttttaccacagcaatgtgtgttctttgtatcgtcgtgaccaagatgtttgtaaaactattttaaaccatgtccttcatgtagtgaaaaacctaggtcaaagcaatatggactctgagaacacaagggatgctcaaggacagtttcttacagtaattggagcattttggtaggtacagtctattttgtggtcctatttttcttttgctatctgtggatacgaatgcaagttttgtatccacatcagtgatttcttctgatcttcctacatagctaatacatcttttaagaatagcagaatgtaatttgtgtttccctcagtcgcttgaagaactacattgctttttgtttaaggcttggctttctaaaccgtttaactcatttctctgcaaattttgaatcacttaataatttgacatgtatagtgaataaaggataacaagccaaaatcagttgaattgttcatgttccctaagtgaacaaattggccttgtccttatctggttattttatgcatattgtcacattccaagataacaccctgatacttacagaggagcacatacatataatttagaacccttgtactatctgattgctaagtaattctaaatcaatagactgttttttgtttttgtgtttttttgagatggagtctcactccatcac

SEQ ID NO: 42 - DNA, 1076 bp, Homo sapiens
ctggctaatttttttgtatttttagtagagatggggtttcaacacgttggccaggctggtcccaaactcctgacctcaagtgatctgcccaccttggcctcccaaagtgttgggattacaggtgtgagccagtgcacccagcctgaatgtggttttgaaatcttcaatataccaaacaaagaaatcttcaatataccaaacaaagaaatttctttctaaagtaagtttactgtaatgtagtttagccattctatggtagcccccaaaaaaggacataatggtataaaacaaataatatacgctaaaatgaattcttttacactaatttcttttagcttgaatttttggcaaggtgagtatgttggcatattccacataatgacaaataagtttagcacagaaagacatattggaagtaacttacaataacctttcagtgagttttctgagtgcttttatcagaatgattatttaactttggaaaacttacttgatttcaggcatctaacaaaggagaggaaatatatattctctgtaagaatggccctagtaaattgccttaaaactttgcttgaggtgagtttttgcatttttttagtaagatctccattgaaaattttaaagcagtctttgtttgttaatgagtaatttttctctatttcatatttaaccacagttcttttcccgtaggctgatccttattcaaaatgggccattcttaatgtaatgggaaaagactttcctgtaaatgaagtatttacacaatttcttgctgacaatcatcaccaagttcgcatgttggctgcagagtcaatcaataggtaatgggtcaaatattcatgaagtatttggaatgctgcagatggcagtagaatgtcttacatagtaacagctcacagttgcaatattaaaaatagctaacacttgttgagtatatacggtgtgcctggcatttatgtttattcttaattcttatacttctgtcacttagattctattatttccttcaatttataaatgaaaactgtgacttagtgaggtaaagtaacttgcttatgccacagagctaacaagtg

SEQ ID NO: 43 - DNA, 1131 bp, Homo sapiens
atataccaaacaaagaaatttctttctaaagtaagtttactgtaatgtagtttagccattctatggtagcccccaaaaaaggacataatggtataaaacaaataatatacgctaaaatgaattcttttacactaatttcttttagcttgaatttttggcaaggtgagtatgttggcatattccacataatgacaaataagtttagcacagaaagacatattggaagtaacttacaataacctttcagtgagttttctgagtgcttttatcagaatgattatttaactttggaaaacttacttgatttcaggcatctaacaaaggagaggaaatatatattctctgtaagaatggccctagtaaattgccttaaaactttgcttgaggtgagtttttgcatttttttagtaagatctccattgaaaattttaaagcagtctttgtttgttaatgagtaatttttctctatttcatatttaaccacagttcttttcccgtaggctgatccttattcaaaatgggccattcttaatgtaatgggaaaagactttcctgtaaatgaagtatttacacaatttcttgctgacaatcatcaccaagttcgcatgttggctgcagagtcaatcaataggtaatgggtcaaatattcatgaagtatttggaatgctgcagatggcagtagaatgtcttacatagtaacagctcacagttgcaatattaaaaatagctaacacttgttgagtatatacggtgtgcctggcatttatgtttattcttaattcttatacttctgtcacttagattctattatttccttcaatttataaatgaaaactgtgacttagtgaggtaaagtaacttgcttatgccacagagctaacaagtggttgactcgagtgaggtgtgtctactatcatgtacaggagatacggactgtttggaaattactgtgattttatgtgagtttatgaaatgataattagcacattttacattgtgctaattacaattatatttacttgagtgaacatccagtgaagcactggaaggattctatcatgaggatcttttatatttgagtactggaataaacatatattaatttcattcttttttttttttttttttttt

SEQ ID NO: 44 - DNA, 1118 bp, Homo sapiens
agttgattaaagagttatccttaaatatgtgggtgttacgcaaaaggtgtactgatcaacttttttccatcacataaaacaaaatttaaatggtacataaaaacattaacttacccgctttcagagtgattaaatgttagagcaggttgacattggaatctgtggactcaactaattggtgttcggccagagaacagtttatcttttctggctagtttgagttcagtgctgttcaaatttgagcaatagttaaaatatattttgagaccctcttcagttctaggagaaaatagattttgtattcaagaccttaatactaagctgctggtctgaacctctttaaataaactcaggttttgttagtctttaagaaagagctagtatgttattatgtctcacagagtgatttatttttgttctggaatatgctttggaaagtagggtttgaaattagaaaattatttcactttttgtttgtttgtttgcttgcttgttttaagattgttccaggacacgaagggagattcttccaggttactgaaagcacttcctttgaagcttcagcaaacagcttttgaaaatgcatacttgaaagctcaggaaggaatgagagaaatggtaattttaagtaacatgtatttgctgttatcatatgcttgctatgaatatcccataaattacttcaccaagtttggtataagagagtttataatccagtagtttacagtataaagctgctctaaaacaactgtatgaattgattgaaactgcattctttctgggtcacaatgggtcaaatcatagcaatttcttttggtttagcatttttatggagaaacccaaaatttaactgagtttttatgggagtataaatggctcccttttttattttaaaaatccttttatatgtgatctgattaaaagctaattaagggaacaggtgacaatgggaagaaatggattgaggagaagaatctcacacaaaatcaaatcattgtggtgtttacagtgaaacttgtgatatttcacgtttctgtagaataatatattttttatggtaatgattatcttagagttcaaattttttcatttatttatgccctggtttgtttcttaca

SEQ ID NO: 45 - DNA, 1174 bp, Homo sapiens
ttaatttttatgggtacatagtaggggtgtgtgtgtgtgtgtgatacgggtatacaatgtgaaataatcacatcatggagaatggggtatccatcccccaaacaaatatcctttgtgttacaagcaatccaattacactgttttagttattaaatgtttctgtattttttagaggataactataatgtttggtttggttctgagtaaagtaaaagatttttagccagaatgttatagatctgtgtcttataaaaaatggatgaaggaattgacttagtggaaagctcacatttgtttttaaacatgtcagtgcttgtgatttagcaaaggtattggtccttactctttcttgtaccaaaagacagaactaggattagtgagtaggaggtttctgaaatgtgtatagcttgtcaaaaaatctggagttcagttgggattttataattgattgttaaacatttacattttacattacattttttttttaatttctttttaagtcccatagtgctgagaaccctgaaactttggatgaaatttataatagaaaatctgttttactgacgttgatagctgtggttttatcctgtagccctatctgcgaaaaacaggctttgtttgccctgtgtaaatctgtgaaagagaatggattagaacctcaccttgtgaaaaaggtatatatggatgagtattttattagaagcttccttaggtcactgtgaaataatttaaaaagttaaagctagattttctgagtggcacttatttaagactaggaaacaattttattttttaggttgggaatattggaaagcagttatacaaaaactattcaaatggtatatttatggtatgcactgtttcttacattccatttaagagcatttcacaaggctttcattgtactaacaagagtgaatgacttgtccaccagactgaccaggcttttggaaatagtatttattgagggaaacacatggagacaagagcagcataggtgttttgcccggtagattctggggcagcacattgggatccagcagggccagaagtcaaattttagagctatcaggcttttaagttcagttatcaggggagaaggactagggtccaagccttataattactacatcagcacagtattatagaatgttggccccgtctcttttccatc

SEQ ID NO: 46 - DNA, 1170 bp, Homo sapiens
ctccgcctcctgggttcatgccattctcctgcctcagcctcccgagtagctgggactacaggcgcccgtcgtcacatccacacacctggctaatttattatacagacgggctcttgctatgttgcccaagctggtcttgaactcttgggcttaagcaaccctccctcctcagactcccaaagcgttgggattacaggtgtgaaccaccactggccagtaattttacattaaatcttcctttaagtataaccaaatgttggaaactcttagcatatttttatatttttatttacttaacatttattaagggtttgctatgtgtcagatactgtgccagttgagtacattttcttaattattattcccatctcatagatgaggaaatcaagaaaagttgaatgaatgttgtttctaggtcctactctaaataatattaacaagcatttaaatgatttatttttttcatttttcttaacacattgactttttggttcgtgcaggttttagagaaagtttctgaaacttttggatatagacgtttagaagactttatggcatctcatttagattatctggttttggaatggctaaatcttcaagatactgaatacaacttatcttcttttccttttattttattaaactacacaaatattgaggatttctataggtaagtttatacatgacatatgtgaaatttgtttaatttaaaattagttaacaatacttagcaagtcccctcaccagcaacacacataccatacccatacacatgtgtgtgtgggagcctacatagtatgagaagcaggacagcttcttttaataagaatgtattgaagggagtcactggacttcagatctggtcctagctgtgccaacaaccagctatctgactttggtcaaaccacataaagaccctctatgccttggttttttaatatgtaaagtaagcaagttacacaaggagatctttcaggtccttttcagctttaatatttgatcatctttcctttggaaaaaattgaagataaattactagtagctggttatttctgccttgtttttcttttctgttgcttgactataggcctcttagttattacttctattagatttagaaacttaatgtaaaactttattttgctaactttaactctgtagaagaaaaat

SEQ ID NO: 47 - DNA, 1247 bp, Homo sapiens
accaagttggccctgcagaacccacgtatatgaaaagtcagtcctctgtatatacagactttcacatcctgtgaatactgtttttctatctgcatttggttgaaaaatatgcaagtataagttcaaacccatgtttttcaagggtcaactgcatttatgttagttgattatgcagaagaaataaatataaattcaagtctccatttttatttgtttattgttttgttttttctttttgctaagggtgctactgaacaaggtcccatttttaaatcccataattatggtggtggtatgttctaagctttctaatttttttaatgtgactatttagaatttacttaatttttccatttataaaattaaagaatgtttaataatctggataaagtatgatactttaatgctgatggtattaaaacagtttttaagaactattttataaaattttacttggaaaagttatatataacctgtattttaaatttttctatttttagatcttgttataaggttttgattccacatctggtgattagaagtcattttgatgaggtgaagtccattgctaatcagattcaagaggactggaaaagtcttctaacagactgctttccaaagattcttgtaaatattcttccttattttgcctatgagggtaccagagacagtgggatggcacagcaaagagagactgctaccaaggtctatgatatgcttaaaagtgaaaacttattgggaaaacaggtatggcttcaatttttatgtacttttcattccctgaatgatatgagatataacctttaagttttaaggctatttattcgatttattcgtatttatatattgaaacttagcttgtggtaatcattatctagcatagccaacccatgaatttttttggttatgtcgtgttgtctccctctgattggcttttaactaagtagaaatgttttaaattagaaataatccaaaaaaccatttgaataattttcttctgccatttaaaaatttattttaactgttgtaatacacgaatgcaaactggttgttaaagtcaaggaatactaaacagtgtacagaaaaccttcactccctcttcaatctcaccaagctttccacttttcaagaaaaacaaccgtccctcattcctatagttctcataccctgctgtttgtttttttgtgacacttattaccttctaatgtatgatacaatttaccttttttttctgtctttgcttttgt

SEQ ID NO: 48 - DNA, 1116 bp, Homo sapiens
aatttgggatggcactcaagtagaagtctgggaagaagttacgcagggaacaaagatgacattgttcgcagtccctgggaattcttaacagtaaagttctgtaattgagacagaattcccaaataaagtcaagagtaaaattcagatagaggagcagttatacatcagtgggaaatttggttggcagaaaaattaccaggtcatacaacttaatgatagacctgaagtcttatttaaaatgattctctaaaattgaagaattggattaagggggccttgtttggctgattttcatactttttcctcttagtctacaggttggctgcatagaagaaaaaggtagagttatttataatcttgtaaatcttggactttgagtcatctattttcttttacagtcatcgaatacttttggaaataaggtaatatatgccttttgagctgtcttgacgttcacagatataaaatattaaatatattttaattttgtgcccttgcagattgatcacttattcattagtaatttaccagagattgtggtggagttattgatgacgttacatgagccagcaaattctagtgccagtcagagcactgacctctgtgacttttcagggtatgtacattttaaacttagagaactagctctaacttcacaagtttttaaagaagtttattggttgacaccttcaatgtctatttcaatttatagacatcactctttttaaaaaattttctttaaaaatagccacctttgaattgaggtaattacctatcctcttttaccatagtctccccacagtaattactctttctaaattgaccacttggttggccaacccaataaccttttcttagtctttctgtaatatttgaacattgtgccatctgttggcccttgaaatttttttcttcatacacattattcctagttctcttctctttatctaggtcttgcctttctagatcaccttttctttttttttttgagatggagtctcactctgttgccctggctggagtgcagtggcataatctcggctcactgcaacctctgtcttccaggctcaagctatccttccttccacctcagcctctcgagtagctgggacgaca

SEQ ID NO: 49 - DNA, 1127 bp, Homo sapiens
taagctacttgaaaatatgctttacttttttttttttttttttaatgtgccctactgtgctgggcatataaaatagtaataatatctgagaaagtactttcacatatgtaatttcatgctgtctaaataagtgttgattgccatgtcttaaagtactgcttttacagtactggcatagagctttgattctgatctgaagtaatactgaggctcatttattgaactgccttttaactttataagattttttaagaaaatcattataagatcatttaagattatttaagttactgagggtgaaaggtatttagataatctgatttatatatctggactgtgatatgtcatttgtgattttattgaaagtatagtttttcagtagaaaaatggtttttgaatttgggggttattaaaatctaaattttcattttggaagttcactggtctatgaacaaaactttttaaaacgatgactgtattttttcccttaactctgttagggatttggatcctgctcctaatccacctcattttccatcgcatgtgattaaagcaacatttgcctatatcagcaattgtcataaaaccaagttaaaaagcattttagaaattctttccaaaagccctgtaagtatacatgatgagtttaataatagaacattccttcttttttagctaaaaaaactttgtaaatacatcttaaagaggaaaagtaaacaaatgaaaaatttatctcataattaaaaaggaaaacattcatttacaagtttaaatggtattttacttgtcagcattaattgaaatatgttacatatgagaacagaatcttgtgacactttagtgatatattagctcagggaatatatctactttttcataggaatatactatttaattgtagtttactttctgaaaattaaataaattggcaatagtttaagatagtaattttcttaatgtaacattttgtacttgatatcaaacccaaatctaaattctgttatttagttattttaaatataaaatgtgtaggtattcaaatatttgaagaaaaaatataaagtgtatttattgtagccgagtatctaattaaacaagtttttactaaatctgtttattttctagga

SEQ ID NO: 50 - DNA, 1200 bp, Homo sapiens
ctgtaagtatacatgatgagtttaataatagaacattccttcttttttagctaaaaaaactttgtaaatacatcttaaagaggaaaagtaaacaaatgaaaaatttatctcataattaaaaaggaaaacattcatttacaagtttaaatggtattttacttgtcagcattaattgaaatatgttacatatgagaacagaatcttgtgacactttagtgatatattagctcagggaatatatctactttttcataggaatatactatttaattgtagtttactttctgaaaattaaataaattggcaatagtttaagatagtaattttcttaatgtaacattttgtacttgatatcaaacccaaatctaaattctgttatttagttattttaaatataaaatgtgtaggtattcaaatatttgaagaaaaaatataaagtgtatttattgtagccgagtatctaattaaacaagtttttactaaatctgtttattttctaggattcctatcagaaaattcttcttgccatatgtgagcaagcagctgaaacaaataatgtttataagaagcacagaattcttaaaatatatcacctgtttgttagtttattactgaaagatataaaaagtggcttaggaggagcttgggcctttgttcttcgagacgttatttatactttgattcactatatcaaccaaaggtaaataacatatttagaccaatatataagcagtctttctatcctgttcttcctgtttttttgctttgttttgttttgttttgagacaaagactcactctgtccgcccaggctgggtgcagtcacggctcactgcatcctcaacctcctgggttcagattatccttcctcctcaccctgccgggtagctggggctacaggagcataccaccatgcctgactaattttttgtgttttttgtagaggtggggtttcaccatattgcccagggtggtctcaaactcctgggctcaagcgaactgtcagcctcagcctcccagtgtgctgggattacaggcatgagctactatgcccaacctatcctgttcttttaattgaaagtttatatgcttctaagaggtagataccagaatgttgctttctgaattttgctttttaagatgtctattatatttacttattagtttttaaaaattgcgctacttgcctgggaaacatagc

SEQ ID NO: 51 - DNA, 1175 bp, Homo sapiens
ttggttccagacaggttagaatagacatatacaatagtttgcaactaatctacttagctccatgaactaccatgagccagtgtctcacaccgaggatataggccactgcttttgtgattgttgccacgctggggtaggggtgggcaaggacaagtaaagttaccacaaagctttcctgctgtttttcagttggatttttcttgattcaatattttcctgattactgtaaacctttgactattttacagaattctaacaaaattagttctgacaattttgcctgtttttcaatgtttctattaaaggatggaagcttagagctgcctattctgcattttgctgatgtgacttctctttttggcttataagccattaaaatatttatgtcaaggcatataagaattagagatgctgaacaaaaggacttctgaatgaatttatttcagagtaattttccagaacttactggttgttgttgtttttttttctccctatattaggccttcttgtatcatggatgtgtcattacgtagcttctccctttgttgtgacttattaagtcaggtttgccagacagccgtgacttactgtaaggatgctctagaaaaccatcttcatgttattgttggtacacttataccccttgtgtatgagcaggtggaggttcagaaacaggtaattttctgactcatcttcaaaatggtatttaaaatatataaagtattgttagaaggatttgagtgttttatgtttatttggtataattggtgattttattgagaatattttttgtaaaatgattggaaaaatattcttaatgaattaacctttgtaatcaattacagagcacttggtacttttgatagttttatctactgtgctgaagtagagaggtagtcaaaactagggatagcagttcgcaacgttatggtggtatttgagttactacttatataaactgtttcattaatattggcattttttttaacctcagtacccatcttgtagtagtaccttacatagttattgaattatttgaaaacacagaaactaaaagctgggtatcttagacgtaattagaacatttaatctgatctaggttaatagattttatcatttattacagtaagttttgttggcttactttaaaattatttctctccttataatttttt

SEQ ID NO: 52 - DNA, 1165 bp, Homo sapiens
tcaaaatggtatttaaaatatataaagtattgttagaaggatttgagtgttttatgtttatttggtataattggtgattttattgagaatattttttgtaaaatgattggaaaaatattcttaatgaattaacctttgtaatcaattacagagcacttggtacttttgatagttttatctactgtgctgaagtagagaggtagtcaaaactagggatagcagttcgcaacgttatggtggtatttgagttactacttatataaactgtttcattaatattggcattttttttaacctcagtacccatcttgtagtagtaccttacatagttattgaattatttgaaaacacagaaactaaaagctgggtatcttagacgtaattagaacatttaatctgatctaggttaatagattttatcatttattacagtaagttttgttggcttactttaaaattatttctctccttataattttttctttttaaattatatttaggtattggacttgttgaaatacttagtgatagataacaaggataatgaaaacctctatatcacgattaagcttttagatccttttcctgaccatgttgtttttaaggatttgcgtattactcagcaaaaaatcaaatacagtagaggacccttttcactcttggaggtaataaaaatttcatcatctactattttttattagagaacatagtagtacttttcaaaaatctgtaatgctctagcagtaaaaaatggaatcttttctttaattgtgattaaaaatatatacgtaggccaggcacattggctcatgcctataatctcagcactttgggaggctgaggcaggaggattgcctgagcccaggagttcaagaccagcctgggcaacatggcgaaaccccgtctctacaaaaaattagtcgggcatggtgatatgtgcttgtagaatcagctactcaggtagctgagatggaaggatcacctgagccctggaggtcaaggctgcaataagccaagattgctccactgcattccagcctggatgacagagtgagaccctgtctcaaaaaaaaaaaaaaaaaatatatatatatatatatatatatatgtgtgtgtatataaacacatacttgtgtgtgtgtaacgtgagatctacctacttaag

SEQ ID NO: 53 - DNA, 1133 bp, Homo sapiens
atgagagagtctattagaatttaaaggattaggctgggtgcagtggctcacgcctgtaatcccagtgctttggaaggctaaggcgggcagatcatctgaggtcaggagttcgagaccagcctggccaacatggcaaaaccccatctctactaaaaatacaaaattagctgggcgtggtggcacattcctgtaaatgccaccttttcaggaggctgagacattagaatcacttgaaccggggaggcggaggtagcagtgagccttgatagcgccactgcactctagccttggtgacagagcgagactctgtctaaaaaagagtattaaaacattgtagggtttgcagtggaagaaatcatttatttcttccttgattagtagtaatagagacatgagtcagtgtctataaatggcacttaactaatttttttcttttattaagttttatttcacaggcttaaccaatacgtgttaaaagcaagttacattttctcttttaggaaattaaccattttctctcagtaagtgtttatgatgcacttccattgacaagacttgaaggactaaaggatcttcgaagacaactggaactacataaagatcagatggtggacattatgagagcttctcagggtgctaattttaaatgacatgggctatttctacctgtttctttttgaaagaatattttgcaaagtcttgctcttggtttcattgtcacagacttagttcagactctcatcatttagttcagaccctcatttctcatctaactgtaaaactggtcctaactggtcttctcaccctgaactcttcctgttttattcatcctctgccagatgatttctctaaacccaaatatgatcatgtttttctactgcctaaattttttttttaagagacagagtttttttttttttttaagagtctcactctgtcacctaggctggagtgtagtggcaccatcataacttactatgaccttgaattcctgggtacaaggaattctcctgtctcagccttctgaatagctggaacaacaggcacacaccactacacctagctactttatttattttttttattttttgtagggacaggggtcccactatgttgcctaggttggtctcgaa

SEQ ID NO: 54 - DNA, 1096 bp, Homo sapiens
atttgaagttcagttttttcattggtactgaacacatatcaagttctcagtagtacatttggtcagtagtgatcattggacagtgtagattatagacatttccatcattgcagaaagttctgtgggacagtgctggtctaaactctaaatgttagatgttaaaaagccaagcaggctcccaaagtcccttctagctttagtgttgaatgattcttgtgcttctgtttgtgattttgctaaggtgttgacttatctgcacaatttgtttaagacattttattttctctgttgtcacatattgctaatcactttcaaaagaatctgttgtattaaggaagttcagattcattccctacatattttttgagctactcatgacttaaaaccttttttaaactttatagaagttttctagtcagataatttaatatatatgcaattataaacaaaagtgttgtcttcatgctagtttaaactaatttttaaaaaattatttctagataatccgcaagatgggattatggtgaaactagttgtcaatttgttgcagttatccaagatggcaataaaccacactggtgaaaaagaagttctaggtaaactacagtcatgcgctgcgtgacatttcagtcaactgcggatcacatataggacagattataatactgtatttttactgtatgttttctgttgcctgtagtattcagtatagtaacatgctatacaggtttgtagcctaggtgtgtagtaggctataccatctaggtttgtgtaagtatattctgtgatgttcacgcaatgacagaattgcccaatgacacatttctcagaacatatctgtgtcattaagcaaagcatgattgtattggcggaatgaatgtgagttatgcggtggtcatctttattatatgagtggttatctttattatatcttcaaaataagtgagggtttgtcatttgggatattggggaaatatgagatgctagctaagttacatgcctatttaattaaaatgtccctaaaaaggccccttttgtacttttcttccttaaatattcatataaaatgaaaagttagagatttacatatgtgtat

SEQ ID NO: 55 - DNA, 1172 bp, Homo sapiens
tttgtatgtataaattttcattgaactgtgtgtttaagattatggaatttgtgtgatacctcaacaaaaattttaacagttttaaggttgattctctctctctttttttttttttcttttgtcacccaggctagagtgcagtggtgccatcttggctcactgcagcctccgcctcctgggttcaagtgattctcctgcctcagcctcctgagtagctgggattacgggcctgcgccaccacgcctggctaattttgtatttttagtaaagatggggctttaccatgttggccaggctggtctcgaactcctgacctcaggtgatccgcccgcctctgtctcccaaagtgctgggattacagtcgtgagccaccgcactcggccttaaggttaattcttgaagtacagaaaaacagcattatagttttgaaattagaaaatttcagttttatgtatgatctcttacctatgactctactgaaatagaatttctatatgtagaggctgttggaagctgcttgggagaagtgggtcctatagatttctctaccatagctatacaacatagtaaagatgcatcttataccaaggcccttaagttatttgaagataaagaacttcagtggaccttcataatgctgacctacctgaataacacactggtagaagattggtgagtatttattgataccttatatgtaatctcaatatgacattcatggagaatgatacttcacacaaatagatattctcagtaactaaagctttgtccttttttaaatctcagtgtctttatgaaaattcttatatttttattaattcacataattatttaccctactatgtgccagacacttgatataatggtgaacattccagacaaggtccctgttaaaattttagtgggactagacaaataaacgataaataagaaaaatgccagatggttctacacagaaaattaagataggggaatataaagggagatgttttaggctcttgtcagtatcagaggtgccactctcctctaagcgaggccttattttgatccttttaaaataagtcgtaaagcagagaggttgttttataatcctagaagtcttaagctaatcagacagggtcttctattacttattctctgtgcaaagcagaattgcaccacatatcaaaatt

SEQ ID NO: 56 - DNA, 1142 bp, Homo sapiens
aatgtttcattcatttcatagtaattcgaaattggtttttctgaaacagatgcacagaaatattagtgtgacttcaacttaagaatactaggaagcaggtacaagttttttgtatttttctttaacagggaaaaactttagatcttcaagggactttagcatatgaagatgtggacaaaaggattcccagaatttttattacttatatgtattagaacatattattttcaagtatttcttgagtctttttaatttatagtagtcacaattaaactgtattgaatgaagggaattgcagttgcagtgattagtaattcaagtttactgaatgactagtgaaagtcctttgatacttttatttgatattggagaattttgtaaatgtaaagtttcctaatacaaattttaaattttagttttgaaattttttcagtggaggttaacattcatcaagattaataactggtgtacttgataggcatttgaattgtttttttcagtgtcaaagttcgatcagcagctgttacctgtttgaaaaacattttagccacaaagactggacatagtttctgggagatttataagatgacaacagatccaatgctggcctatctacagccttttagaacatcaagaaaaaaggtctcttaagtaataaatgtttattgaatacccagcatatctaaaacagttctgtttgctgtgggtcatgactgttaaattgcttgaaatagtattgtactaactattaacctttcctataagtaatttaagccatatttcataaatccagggaatgtgttatttttaatttattatggcagtgtggaaaagctcagataggtaacctgaggaaatagtagttgatttttgggggaggggaaattcttaaagacagaccttgtttttttagaaatagaaagcgctactttgctcccatgaaagctgttagctctgggtatggtttatagttattgtgatccacaagtgtttatttccatgtcaagttaacatatcacaatcccctggtgaaatataggaagacccatagatttctccctttttccatgttgatatcgtaataaggttccactgtaagtattctgtgaagcatgtttaagaacacttgttccttccttagt

SEQ ID NO: 57 - DNA, 1177 bp, Homo sapiens
caccaatttaatttcagggcagaaacccaacattgaagcagtactttcagtgcatcataaatataattttagtgttagtaaaattactggtaatataaactgttaatgaaactaataatataacctggaaggcattataattctaacattttaaaatctcatttcattttgaaatcaagtctctgtggtagatgtggtctagttttgttcaagagacagatgagtcagagtttgtgatttgtgtaatatgctactaatgagtgacagagctgagagtagaacctaatttttctgctgcctaaagcagcagtttttgccataccactctgcctcttgtataaacataaatgttttcatcttaaaaggtaaacattgcctccagatttagttttaactgtatttagctttattcagaaagatttgttatactcattttgtgtaggaaaggtacaatgatttccacttctcttatttacattttctaatccctttctttctagtttttagaagtacccagatttgacaaagaaaacccttttgaaggcctggatgatataaatctgtggattcctctaagtgaaaatcatgacatttggataaagacactgacttgtgcttttttggacagtggaggcacaaaatgtgaaattcttcaattattaaagccaatgtgtgaagtaagaagattaattagtctgatataattccttgtttatgacctgtttatctaaagagtgctgtgatactgcacatcatcttcacataatatcacccccactcaaactgttgtaaatttattaaagtgagcatccgtatttagtcataactttatgcattaggtttcagcttcgggatagcaacatactagaggagttctaaggggtgccttgaataatttgttactaatgatagttaaaatactgctgattataaattatttgcattaaccaagagcctgttctaactttgtttacgtcttctgataagagcacctttattttccctgatatgctttcttgaataagaaaaaggagtggggcagcaatcagcatagcttttttatttttgaggatatagtacaatttatctcaacgaagagtaaaggtacataccaaatgaaacaaagtttgtactcttccatcaaatgtgtaatctaaaacagcatactatgatgctc

SEQ ID NO: 58 - DNA, 1178 bp, Homo sapiens
agaagttgggcttattaaaaaataaacatttttaacatgactgttgtagttcttcactgaggttagaaaatgcataaaaatcagatttccaacttttgtcttaaacttttgatacctttttccctcttctatcatatcagaaaactccttctgttactaacgcttttcaactctgaaattgtatttaaagtggtgatataatttcatttgtaagcaatattctgtttcattatggtaatggcctagactggaaataaacagttacagtgtcactaacatatatatttgatattgatatactagcctagtgtggttttttaaacaccacctaatacatgttttttgtttgtttttttagcagtatgttgagtttatggcagattaatctatcatcttttagaaatttaatatgtcaacggggcatgaaaattttaagtaaaatgtattaattttactcatttttactcaaactattgggtggatttgtttgtatattctaggtgaaaactgacttttgtcagactgtacttccatacttgattcatgatattttactccaagatacaaatgaatcatggagaaatctgctttctacacatgttcagggatttttcaccagctgtcttcgacacttctcgcaaacgagccgatccacaacccctgcaaacttggattcaggtattctattaaatttttaacattaatactgtaaactcagttctagagaaagatggatttaagatggaatcccactaaaagcactttacaggattaaatctataacctctaaatttgtttcttcatctatggaatggagataaaagttgccaacagttgcaacaagttttcaatgaaataatgtgtgtaaagtgcctaggatagtacttgatgtatagtattccctcagtacattttggctattgataatgggtcaactaattgagctttcaatatgtgtcaggcactgtgcttgcactggcaatattaatgtgaaaaagaaacacccacattctagcaatggaaaaaacaaacacaatcagatattttaggtactgtggtgcagatacgatagaattttcatattttcagagctctggccaactcaatttaaaaagcagcctttggccgggcacagtggctcacgcctgtaatgccagcactttgggatgccaaggttg

SEQ ID NO: 59 - DNA, 1088 bp, Homo sapiens
atcagcctcccaaagtgctgggattacaggcatgagccattgcacttggccagtatcactttttctatgaaacttttcttgtctaggtgaggttccctctgctaagcttctgtagcattttaaactttcctattataacacttatcatattgtgttgtaatgtcccaggctagtcagtgagttctgtgtggtctgacatgatctgtcttgttcatgcttatatactgaggacctagcacataaaagatcttattgaatcaattaattagtcctcctttgaaataaaatataaattacaatgtaagttctcactttttttaagataacagtttcttttaaaagcaaaagaaatcctattaaattccttcagaaccaattttgtgttaggtactgcccaccagaaccttatagcatagtgggagacagacacataaacaagaaggaagaaggtgtgtaagcaagaatgcctgggactgaggggagatatttttgtttgtcagagtcagagcactttttccgatgctgtttggataaaaaatcacaaagaacaatgcttgctgttgtggactacatgagaagacaaaagaggtaatgtaatgagtgttgcttcttacgtttaggatctagagtgtaacttgttaactatcggctgaattttaacatgattattttaggtgaaggtgttgcaaagtgttatatttaatttgtgtgatatttatatctccttgcagtaatccatattcaggatagcagtttggttaaatcagtgtcaagaactctcaattctagtaccagctgtaccagtaaccatgttacctttgttaaattatgcagccttcttggctccaatttatttcatctatgttagggataggagcaagtgtttttccaagttacatttagctgtattacccctctttttacttttctctttgctttagttctaagaagtaaatagagttgtgtaaatgtcttctttatgtatctttattttaagatgtaagtttctttactgtgtgcagtggtctcaaaatctgtggcaatactgtgctgtgacaatgtttattttcttgtttctggtaaattgt

SEQ ID NO: 60 - DNA, 1156 bp, Homo sapiens
agtggaagatttttattaagtaactcaacctaggcaatacattaaggagaaaataagtcacaataggaaagacatgtatttgtgtcttagatgaaacaatattttttattaaattgactgttttaaagtgtgtgttggggggtgcttgtgtgcatttgtattagctattctgtgtatcctattcttagtctgtggtacatggatttcttggtagagagcagatatgaaccccaattttgtatcaggtgatagtctacaggttttatcagattctctgataggtttgagggaaaaaagaaaaaccaaaaagattaattaaataggactcttcagccatgttatcttataatgtttataggtatatattggggaaatgtggtttttgggaatttgtaattttctgttaagcagtcactaccattgtattctatatcaacatgcttttattttgatattgaagtttaaaaaagtgaatgacattatatctcatttttctttagaccttcttcaggaacaatttttaatgatgctttctggctggatttaaattatctagaagttgccaaggtagctcagtcttgtgctgctcactttacagctttactctatgcagaaatctatgcagataagaaaagtatggatgatcaagagaaaaggtaatggaatttagaatttttggtttttaaaattaatgttggcattgtctcaataagggtatatagtaaagatttattttgcctcctgttccccatttaaaagatattttagatagaaattttgttttaaagtgaaattataataaatttttaaaaaggaatatgtaattcctgttctgaaataataggaatgcttattacttaggtattataaaaatttaacagatagcaaattcctataggacagagtccatacttaattttctgtatattccccataatagccctagcattgagaacttaatttaagggtgataaatatttttcaaatgattaaattatttcctaacttcagtcagattagatttaccactaatttctaaactattcaagattcattttggatataaaatatccaaaattataatccaaaatggctataatgtgactgatttatttctgtgactaattaagtttcatttctttatctacctatattt

SEQ ID NO: 61 - DNA, 1088 bp, Homo sapiens
ttctaatcctgactgtcaaactttctagttttatagtcttggtttaagtggatcctactgatctacttccttttcaatagttaatatcagatgtcttaaatttatatctgttaagtattaaattctgtcttattgtggtctttatttgtgtgtctgtaattattgattgggttgaatttcaggtgaaaccactgacagagtatatagtacctgaattggatggcatctgctctatttttaaacaatccaatctctttataaataatcatatttttgcatataggcttcccatatgtagattattcttaaaatataattttcattcacaaattccttttccatcctaggtataaatggtattatgttttaaagtataagtgatttattctgttttgtttgccaccttcattagtttttttctgtcaaagtctatagtatatgtattcaggagcttccaaatagtatgttctcattaaaagaggtgttcttgtgacaaacagaagtcttgcatttgaagaaggaagccagaatacaactatttctagcttgagtgaaaaaagtaaagaagaaactggaataagtttacaggtaaatattagaggctctattatttatgacagtatttatctcatactttgggttattttgttatagacactgtacagatgccatgtgatttttaaactgaatttacttactggactaagcatcatatatataaaattatggtctgaagcttaagccttagagtagacagacttgagttctaatactgactctgccacttcttgagttccttatctgaaagacgaaggtaaaaccacctgtctcagagtttatgccatgcattttctgccatagcaccctgttcatttcctttatagcacttagggtttataattatatatttatttgtttgcttgtttattgtatgttacagaagaagcagattgcctcttctataaatttcttgatatccattcttaaattggctcatgttactgtctgggatgcttgccgaatttctttggtcaactcattcctccacaatgacaatttcagcttctccattctgcttaaacctctca

SEQ ID NO: 62 - DNA, 1089 bp, Homo sapiens
ttatatttgtcttaaccacaaataatgctgtgtacagtgtgtgtgtgtaagttttgataaattttaactctttgtaatagatttgtgtatattttatggtagtaaatgatgaaatgtatcatatcaaatgtatacaaatgatggaatgtgtagactagttgtacatttattttatgcattcatgacataacttttaaaaaatttttcagtagttctaaactgtgtggtttgtgaattttttcaaattgtggcaaacctccaaaaagttttcaatatatttattgaaaaaaaaatccacatataagttgtcctgcacagttcaaactcgtgttgtttgaactgtatttcagaactgtatttcagaatcattacattttatttctataacataacatttagagttgggagttacatattggtaatgatacaatttaaaatttgctaaatttatagaccgattttttttccttcttcaatttttgttgtttccatgttttcaggatcttctcttagaaatctacagaagtataggggagccagatagtttgtatggctgtggtggagggaagatgttacaacccattactaggtaaattgcatttttctaaacaacggtatagtaattctgtttatgaaggagttatgtgtgtgtaaaacccaaagctattttcacaatcttttcttatagactacgaacatatgaacacgaagcaatgtggggcaaagccctagtaacatatgacctcgaaacagcaatcccctcatcaacacgccaggcaggaatcattcaggtacattttttcccagatttggtaaagccatcactagtgtagtgctgaggttatttcagtatgttggtggatatttacacagccagataaactctagagataagactagaacttatctgtttttcagaggattaggctaaacattcagggatactcctgaagcagagggatgcaaaaaaaagagaaaaaattcagggagacacaggaaagtcagacaggtcattgacctaaaagatagtgtagatttcttgatcatagtgttgttggataacaacagaagacattgctcgagcatata

SEQ ID NO: 63 - DNA, 1103 bp, Homo sapiens
aacttttaaaaaatttttcagtagttctaaactgtgtggtttgtgaattttttcaaattgtggcaaacctccaaaaagttttcaatatatttattgaaaaaaaaatccacatataagttgtcctgcacagttcaaactcgtgttgtttgaactgtatttcagaactgtatttcagaatcattacattttatttctataacataacatttagagttgggagttacatattggtaatgatacaatttaaaatttgctaaatttatagaccgattttttttccttcttcaatttttgttgtttccatgttttcaggatcttctcttagaaatctacagaagtataggggagccagatagtttgtatggctgtggtggagggaagatgttacaacccattactaggtaaattgcatttttctaaacaacggtatagtaattctgtttatgaaggagttatgtgtgtgtaaaacccaaagctattttcacaatcttttcttatagactacgaacatatgaacacgaagcaatgtggggcaaagccctagtaacatatgacctcgaaacagcaatcccctcatcaacacgccaggcaggaatcattcaggtacattttttcccagatttggtaaagccatcactagtgtagtgctgaggttatttcagtatgttggtggatatttacacagccagataaactctagagataagactagaacttatctgtttttcagaggattaggctaaacattcagggatactcctgaagcagagggatgcaaaaaaaagagaaaaaattcagggagacacaggaaagtcagacaggtcattgacctaaaagatagtgtagatttcttgatcatagtgttgttggataacaacagaagacattgctcgagcatatacaatgtgccaggtagtgtacttactgcttcacatggaaaatcttatgtaaactatttctcatagtttgcaacagagttggtcccagaacctgttgtttctattactggctaatactccttagccattcttccatgaaatattagagccctttgagctctatttttgtgttttttgggaaacattaaacgatattttgggatt

SEQ ID NO: 64 - DNA, 1149 bp, Homo sapiens
ccgagatcgcgccactgcactccagcctgggcaatagagcgagactccatctcaaaaataaataaataaataaattttagagataaggtgtcaccctgttactgatgctggagtgcattagcgtgatcatagttcactgcagccttgacctccctggctcaagggcacctctcgcttcagccacccaagtagctggggctacaggtacacactaccatacccagctattttaaaaaaaaaaaaaaattgtagagacaggtcttggtttgttgtccaggctggtctcaaactcctgggctcaagtgatcctcctgcctcagcctcccaaagtgctgagattacaggcatgagccaccacacccagctgatattttgggattttaaatgatattgtgaactaaaatttgtctaagttaatttgtatctttgctgtttttttctctggttttctgttgatatctttgattacttaacttaaaaacaaaataactcctgtttaggccttgcagaatttgggactctgccatattctttccgtctatttaaaaggattggattatgaaaataaagactggtgtcctgaactagaagaacttcattaccaagcagcatggaggaatatgcagtgggaccattgcacttccgtcaggtaagaaatttgacttgatttttttttttttgcctctctcctcattctaaacaacaactgtttttctcttctatgaatataacaggagttgttttatatatatatatatatatatatatatatatatatatacacacacacacacacacacactatatatatatacataccatatatatagtgtgtatgtgtgtatatatatataaaaaaatatatagtagatgttgcaagctatagatagccctaaatccttcagtaagatagcaataagcagttaatgcacctaggcttgaattttactctcttattccattaggacaacttcaccccacccctaaatatttctaaaaacagaaatatgaaaagggttttcgaaatgagtatcatctcgcatagtttgttggactgaggcatgccaagaaaagtataggcattcctctttctacttcctgctacaaacattttagtcagtaagatagcacttatattggctggaggat

SEQ ID NO: 65 - DNA, 1105 bp, Homo sapiens
tcggaccctagttaaataataatgtatcttcagagaggcctttcttgattacccattctataatagccatctagccattttgttttgttaccctgttttaattctctgcatgtcccttgttactttccaatacttatttattgtctgttcctccaaaccagcacataaattccatgagagtaaagacctgatctgacttgtccacttgtgaattccccttgtgcctagtgcctggcacataataggtatttattgaataaataaatgaaagtagagcatatttagaaccaggcagagtatctgagtaatttcctttttttctgcttaaagaatttaaatgactcataaaatttgtatttcttaccaaaaattctagaaatgcattttttagaatggagaaatgttaatttaaaaattttgtcctttggtgaagctatttatacatgtatatcttagggttctgtttttaagtatatttttttctttgacttatctcacagcaaagaagtagaaggaaccagttaccatgaatcattgtacaatgctctacaatctctaagagacagagaattctctacattttatgaaagtctcaaatatgccaggtattatgaaaagacaaagttactgtattttaacatttaatgtcatggcttcttttctgaaaacttgagaaacaattttaatgtaaggatttgcattgatgaagagataaagacttggtggctgtgatcagatgtttccttgtaattctctgccctccttcaaaacaaattgtttctgggattccaggttcattctttaccctgacccttcaagaaagttttggtgattccctctttgttctcttcctatacaagtatcctgagaattatatcttgtctcttttggtaattgtatggcatttagtgttctaatttataaaattgtaactcacggttaatacttacaaacttgttttgaggcacaaatgtgatgaggcatgaggaaataattataatggggtaaacaaatgcagcatttttaaagccgtagtgacttaataaatcctatgtttatcacagaaataaaatttactatcatttaagtgcctatgatatgctag

SEQ ID NO: 66 - DNA, 1120 bp, Homo sapiens
tcaaaagcttaactactaatagcttactgttaaccagaagccttaccaataacataagcagtagattaacacatattttgtataagtattataataccatattcttacaataaagtaagctagagaaaagaaaatgttattgaaaattataaggaagagaacatatatttactagtaagtggaagtgggtcatcataaaggtcttcatccttgccaccttcatgttgagtaggataaggaggaagggttggtcttgctatctcaggggtggcaaggtgggagaaactctgagtgtaagtggaccatgcatttaaatttgtgttgttcaagggtcagttgtattttgtttccactgctattttgtattcactgttgcttgttagtattattagatcagtagcaaagcctatgatgagaactctttaacaacaaatttaaacatttatttccctgaaaacctcttctttattttcagagtgtcttttcttttttgctactagagtaaaagaagtggaagagatgtgtaagcgcagccttgagtctgtgtattcgctctatcccacacttagcaggttgcaggccattggagagctggaaagcattggggagcttttctcaaggtatgtaattcgtatgactttgttatcctaaagtgcagcttttctgttaccaatagtgactttaaaaaataaaaactataggccgggcacggtggctcatgcctgtaatcctagcactttagaaggctgaagtgggtggatcacttgaggtcaggagttcaagaccagcctggccaacatggtgaaaccctatctctactaaaaatacaaaaattagccaggtatggtggtgggcgcctgtaatctcagctattcaggaggctgaggcaggaaaattgcttgaacccagcacaacaggcagaggttgtggtgagccgagattgcgccatggattccagcctgggcaacagagcgagactctgtctcaaaaaaaaaaaaaactatgtagagaccaaatgtgtgtgtttctttccttttatcaagatataagttgattagccctagtgaattgtgcttttattaaacattttccaaaatagtcattgtaaaaatttaagttt

SEQ ID NO: 67 - DNA, 1235 bp, Homo sapiens
ggtaaatgaaacctttgccagatgccagcttttccttcactggattgtgatttttttgacagctataattatgcatcaagtcatccccagtagggggtccctcatttccttgctgacatgtcctcattactacaggcagtattgaagcaggactaaagatggaggcattctttatgataggtctgatgaatatgttcttgtttcagaagagtatttagaagggctgctttttgtaatgtcagagtattaaaaattttttttgatgtttgtcatctgtgacctctctgctaataactcttaagagctctgaccgcatagcattttgtagttttctaaattttgatccatatgtaggattatttacaagttctagtcttgtcactacaaaagttcctttgtattattataatattatatcgtaagttccagaacttacatagtttttttttttttttttttcatttctcttgcttacatgaactctatgtcgtggcattcagatcagtcacacatagacaactctctgaagtatatattaagtggcagaaacactcccagcttctcaaggacagtgattttagttttcaggagcctatcatggctctacgcacagtcattttggagatcctgatggaaaaggaaatggacaactcacaaagagaatgtattaaggacattctcaccaaacaccttgtagaactctctatactggccagaactttcaagaacactcaggtaaatacaatttaaaactatgtcatcttacctcttgactttccttttattatttaaaaaacagaaagcctgagggaaaaagaaatgtcattaagagatagagatctctattaatatatagtaaaaataattgtttaagagttcccattttggaattagatctgacttttaagccttgggcaagggtacttaatcttttctcaacctcaatttcctggttataaaatgagaagatacgtaacttactatattgataacaattcagtgattttatatactgtgtgtatgtacacacagatacacatacatacatatagagagagacagacagacagacagataggcagacgtggggtggggagatgtcatgcagacagagaggtccttaagatagtccctgacaagtagttaagtcctcaatgaatggtagttgctgctttcattattattattattcatggtagtagtatcagtagtaaaagtatttattcccatatgtc

SEQ ID NO: 68 - DNA, 1168 bp, Homo sapiens
aaaactatgtcatcttacctcttgactttccttttattatttaaaaaacagaaagcctgagggaaaaagaaatgtcattaagagatagagatctctattaatatatagtaaaaataattgtttaagagttcccattttggaattagatctgacttttaagccttgggcaagggtacttaatcttttctcaacctcaatttcctggttataaaatgagaagatacgtaacttactatattgataacaattcagtgattttatatactgtgtgtatgtacacacagatacacatacatacatatagagagagacagacagacagacagataggcagacgtggggtggggagatgtcatgcagacagagaggtccttaagatagtccctgacaagtagttaagtcctcaatgaatggtagttgctgctttcattattattattattcatggtagtagtatcagtagtaaaagtatttattcccatatgtcattttcatttcagctccctgaaagggcaatatttcaaattaaacagtacaattcagttagctgtggagtctctgagtggcagctggaagaagcacaagtattctgggcaaaaaaggagcagagtcttgccctgagtattctcaagcaaatgatcaagaagttggatgccagctgtgcagcggtttgttttttttattggctggattagtgttttactgttatttaaaaaaacacaaatgtactttaaaatatttttaataacaattttattagagccttgaaattagtaatttattaacaagatattgtaaaactagtcttgaaaattaatttgtaaatgaagtttagaaactttttcctatatatcacaattctatcagtccatcatgtggtcgattcatttaatatatcccagtattaagcctttaacttcctatagaattcaagaaaggtatgtgggaaatgaatgaaatagctactctaaatttgaaatgacaagtgaaaaaagggaagaggaaatgaatgagagaactaaattagaaaataaaagcaagttgggacaattaggttgtcaatccaaatgctttgaaaatatcacatctaatattttatctaacattacctgttggtttttgcaaacttatgttgctacttcagctgtaaacccagcatacacactgg

SEQ ID NO: 69 - DNA, 1114 bp, Homo sapiens
tgttgggcactcattgtatagcatcttctgttattagagaaatcattataccaaagcactgagtgccaatatgatatgtgtaaatattgcttaatagtattggccctgaagtatgtgctgtctggagttacccaacttccttgtacctcagttttctaatctgcaaattggggtaataatagtacttatttaataggattcttgtgagaattaaatgagttaatatatataaagcctttacaaagtgtctgacatatataagtactcaataaatgtgacttgctccaataatggcaataataataataaacagaggatgatcatttcctacatgggattattaaaatagttgtatggcaaaagcagatgaggaaaaactttttttttcccacccaccaaggaaaaacatttttaacctgcttttttccccgtacatgaagggcagttgggtacagtcatggtaatgcattatattttaagattttgcctttcttatacagaacaatcccagcctaaaacttacatacacagaatgtctgagggtttgtggcaactggttagcagaaacgtgcttagaaaatcctgcggtcatcatgcagacctatctagaaaaggtaagatttttggagcaacccttaagatagttacttagcatgaatatgcttcatcttttcatcaagatcaatatatttccaaagcaaataaaagtatggttttatttttctatatattattactgttgtagctctgtatagtctctagggtggagtgaaacattgttacaaaacaaagcagccaattttgaaagtaagcccaagtatagtatctcttcttcctccttcctacctccactaccagctaccctttcagcaggttgcttctgatcatttcttcatttatgcatctacaaaaataactgattaagaataggcaagtcagcccttgctcttcattagcccagccacccacaagtaaaggcttcaatatactagcccctttgactttcctgtttctccctcttattcctttagattcactaattttggaaatagttacctcactaaataagtgtaacatgaaacacatgatgcgattgtctttcttttcttttctt

SEQ ID NO: 70 - DNA, 1218 bp, Homo sapiens
caggcttgagccaccacacccagcctgattgtctttaaattttataaagttctctgtttttgcagagttctttacaagtattagctgtctgggttatttctacactgtcaaagttgttttgaaaagtcaagaaaataccatagttcagggctgtccaatcttttggcttccctgggccacattgcaagaagaattgccttgggccacacataaaatatactaacattaatgatagctaatgagcttaaaaaaaatcacaaaagaaatctcataatgttttaagaaaatgtacgaatttgtgttgggccacattcaaagccgtcctgggccacatgcggcccatgggccgtgggttggacaagtttgcaatagttcatataatttagctagcttttatatgtatataagttaaattttagtgtattaccttaatttgagtgattctttagatgtatttagtatttgtaaatataatttaaattggttgtgttttcttgaaggcagtagaagttgctggaaattatgatggagaaagtagtgatgagctaagaaatggaaaaatgaaggcatttctctcattagcccggttttcagatactcaataccaaagaattgaaaactacatgaaatcatcggaatttgaaaacaagcaagctctcctgaaaagagccaaagaggaagtaggtctccttagggaacataaaattcagacaaacaggtaactaggtttctacaagtgacaattttatgttcaccagttaactgagtgagtgtttttgcatagaaagagtgacttggtctttttatctgatatagttttgagctctaaaggtcggcttaactatatatagattatcttggtcttttgggttcttttcggtttttgttttttgtttttttttttgagacaaggtctcactctgtcacccaggctggagtacagtggcgtgatcactgtactccagctcactgcaacctcgacctcctggactcaattgattctccccctgagcccccgaaatagctggggctacaggtgcacgccatacctggctaatttttgtattttttgtagagatggggttttgccatgttgcccaggttggtctcaaactcatgggctcaaacgatctgcccaccttggccgcccaaagtgctgggattacaggtgtgaggcactgtgccctgtctgtcttggtcctactgtagttaatcaca

SEQ ID NO: 71 - DNA, 1208 bp, Homo sapiens
cttggtcctactgtagttaatcacaaattagtatgtaagatattgacgtgttcttttgtgaataattcatgctctgcttctaagttcattgtggagaatatagatattagctttctgttttgcttttttggtttgtttgttggtatcatagtggaaaaggagatagatattgaaattaattacaaaagttacctattttgatgtaattaaatccctttatttaagcctgtcttgaatctgtatattttagtgtaagcagaggtgtaagttagctaaatagcttggggagagtcccctttgtcctttgatgcttaggaaggtgtgtgaattgcacagttaagacaaaagtaagtttattccctttataatccttagaagtttgcttttttccctgggataaaaacccaacttttttcattaaatgttgtatatcatgtgtgattttgtagttctgttaaagttcatggcttttgtgttttaccttaattattctatgcaagatacacagtaaaggttcagcgagagctggagttggatgaattagccctgcgtgcactgaaagaggatcgtaaacgcttcttatgtaaagcagttgaaaattatatcaactgcttattaagtggagaagaacatgatatgtgggtattccgactttgttccctctggcttgaaaattctggagtttctgaagtcaatggcatgatgaaggcaagtgttactcagcccaatattctaccctgtgcttgaaaaacttagacataagccccttgatgtcaggaatcgtgtatacctctttgtattcctagcacttggtccagtgctctacacataagtagcattttgtagttttctaaactttgatccatatttaggattatttacaagttctagtcttgtttctacaaaagttcctttgtattatataagctgacaagctgtaaatgatgcaagtttgtgtggaggtgatagaatttagcttggtcctatgtctttgcagttaccataggagagggtctagaatggggcattagattggaggatttagaaagcagttaaagatgatgtgatcacaggtgggttttccccctgctgcagaaatatgggatttttacaataaattacttttgtaagtagagaaaatatatttttcagaaaatgtcaagacagcagtattgtataagtttttctttgaaaaccttagattatag

SEQ ID NO: 72 - DNA, 1114 bp, Homo sapiens
taagttgacaagctatatattgttagtcaatttgaaggttagagataaaatgtttctcctgcaggaaaataataagactcataatagatacagtcaatctctgctgtagtatacactaaatattacttttggcctatggggaaaagcaattacttcattttattgtacactgacttctcaggaatcaagatcacagtcacactcagatcacatttgtcttccttagattttttggaatataaacagtaccaagtattctagttctgaatccagtttaatttaggaccaaatattttgatttaccaatgcattaatctagagtacccattagaaagaccttcagataagaaaagaaatgaaggaaaacaatatagttagtgaagttttgttaaccacttgtgctaatagaggagcactgtcttaaaataacttacttgcttagatgtgagaatatttgaaataccttgtttcttaattttgtgtcttttttttaatggtagagagacggaatgaagattccaacatataaatttttgcctcttatgtaccaattggctgctagaatggggaccaagatgatgggaggcctaggatttcatgaagtcctcaataatgtaagtaaacctgaaaatcaaaccacaataattatttttattctattattactatatattatataaagtatatataccattccctctaagaaatggaaatacaaaattttgtattttttgtcttctcacatcacataagttactcattttctctctctaattcctcataggcctctgcctttttctcacacatgcaggcatacacgctctacccactgcagtatctagacagtaatacacattttaatgttaagcaaaatgaaaaatatggattatatttttttgtttatttgcataaatctaatagttcttttcttacagctaatctctagaatttcaatggatcacccccatcacactttgtttattatactggccttagcaaatgcaaacagagatgaatttctgactaaaccagaggtagccagaagaagcagaataactaaaaatgtgcctaaacaaagctctcagcttgatgaggtatttggattaaacatacg

SEQ ID NO: 73 - DNA, 1159 bp, Homo sapiens
tgcttagatgtgagaatatttgaaataccttgtttcttaattttgtgtcttttttttaatggtagagagacggaatgaagattccaacatataaatttttgcctcttatgtaccaattggctgctagaatggggaccaagatgatgggaggcctaggatttcatgaagtcctcaataatgtaagtaaacctgaaaatcaaaccacaataattatttttattctattattactatatattatataaagtatatataccattccctctaagaaatggaaatacaaaattttgtattttttgtcttctcacatcacataagttactcattttctctctctaattcctcataggcctctgcctttttctcacacatgcaggcatacacgctctacccactgcagtatctagacagtaatacacattttaatgttaagcaaaatgaaaaatatggattatatttttttgtttatttgcataaatctaatagttcttttcttacagctaatctctagaatttcaatggatcacccccatcacactttgtttattatactggccttagcaaatgcaaacagagatgaatttctgactaaaccagaggtagccagaagaagcagaataactaaaaatgtgcctaaacaaagctctcagcttgatgaggtatttggattaaacatacgtaccttttagaagtgtgatattcagtctttcctagaatatttctttttaaaatcttgtgttattaagatgccatctaaaatcggttcaaggctggcacggtggctcacgcctgtaatcccagcactttgggaggctgaggcgggtggattacttgaggtcagaagttcgagaccatcctggctgaccgacacagcaaaaccctgtctctactaaaaatgcaaaaaacagctgggcatggtggtgggcacctgtagtcccagctactcgggaggctgaggcaggagaatcacttgaactcgggaggcggaggttgcagtgagccaaggttgcgccattgcactccagcctgggcaacaagagcgaaactctgtctcaaattaattaattaattaattaattaaaattggttcaaaattccttaatatttgtcaaagcataggagataccagtagtagtttacttttttcctcaaagcagtt

SEQ ID NO: 74 - DNA, 1139 bp, Homo sapiens
tctctactaaaaatgcaaaaaacagctgggcatggtggtgggcacctgtagtcccagctactcgggaggctgaggcaggagaatcacttgaactcgggaggcggaggttgcagtgagccaaggttgcgccattgcactccagcctgggcaacaagagcgaaactctgtctcaaattaattaattaattaattaattaaaattggttcaaaattccttaatatttgtcaaagcataggagataccagtagtagtttacttttttcctcaaagcagttggcaaagtgaaacaatagattttgaaaggcacctaagtcattgacgagagtatgtatctttgatgtatttcatttatgactgttttgtttgtatctgaggaattataatcattccattgtctagatttgtgcataaattctgtttttctctttgtttttctaactctgagaagtttaaatgttgggtagttccttatgtaatgttttttgttttttattaataggatcgaacagaggctgcaaatagaataatatgtactatcagaagtaggagacctcagatggtcagaagtgttgaggcactttgtgatgcttatattatattagcaaacttagatgccactcagtggaagactcagagaagtatgttttttttaaagaagaaacgttactttcttgctgtgttactctctgtagagatatattagttatagagcctaataagtaaatctgcttaaaatcacaaacgtaatccaaaagcttaatttatatctgatggcttcagcattccctggttactttttcacttaatatctcttaatagaactggtaataggtgactacactaaattaattatttgatttcttctgataatcttctggcatacatacttattacagagaattgcataatagaggcaagtctattaaaataattgaataactgaacatttctagcctcaaaagtttttttaaacgatgtggttactaaaactgccctgggacttaaaaacaaaaaaaggctttaccatttcttccataggtgctaaaatgccattatttaattattattcttgctgtgtcagttcaaataattacaagctgctatataatctttggttttgtgactagtctctaagtat

SEQ ID NO: 75 - DNA, 1083 bp, Homo sapiens
ctagtctctaagtatgcttctaagtatctccccatactttaataattgtatttttttctattcagaatcatatcttcaagtttaaattcttattacttgaaaacgaatgggacttcacatattgtttctctaagcaaacaaaaagtattgacatgtcttttagttgcatttaatggtaatgtgacaggagtatgttatctatgtactatgcaaactattacgtaattattttaagatgtttagtctggttcctcaggtggaatctggtctagttacccttgtcaggtaacctgcaaatttacttgaagctacattaaccactgttgagctttgactctgagctgcatagtggccaaagcccagagtcttcatttctcaatcagagcctgaaccacagattagcaacaagttggggccagtggtatctgctgactattcctgcttgaccttcaatgctgttcctcagtttgtcactaaaatctcttcatttttaaatacagaaggcataaatattccagcagaccagccaattactaaacttaagaatttagaagatgttgttgtccctactatggaaattaaggtaatttgcaattaactcttgattttttttaaactaaattttttttattagattgaaccatttgaaatagtatttttatgtaggtcaaaattggttaaatattggcaaatttcatatgtttcaacctataatttctcagtattatatttcctttgcccaagccctaaaatactcaaaagcttctcctgctttcttttccattgccttctgttctacacctcccatctttcttatgaaggtctatagactgttactttcattggccagaaggagagtttccgtgtgcttatgccaagattaatttttgacttggcaaggaaggttccaattgtcatatattgtttttaaaaattctatgtgcagtaaaatgtattggctgtgatatatcacagtattaagtaatatagtatgtattattataatattaagctgacttcatatgcatgatacacttagctctgttctaatattcttttattgcaagaaataatggaagtaat

SEQ ID NO: 76 - DNA, 1141 bp, Homo sapiens
ttcatgtgggcagggatatatgtaataagggttataagtttagaaaatgatcatcttaaatacattgtctttcttttcattttgcagtttagtgcttagtatctagttacttgatttgaaatgtagctgtatcatgtggattaactgctgtttttctagctatatcagctaggtgatttcgctgaatgtttccttaaaatgccagatttagcagttataacccagaaaactccttctactgttttccaaaatttactttatgttttcgtgaggagttatttctcagatgactttacatatattagtgaatctttgatgaaacagtagttaaagttacgagcgtgagccaccacacccggcctaaagttgtagttcttaaccactatcacatcgtcatttgtttctctgtttaatattaaaattgccatttataatgtatttttctttaagtgcaaatagtgtatctgacctattatcaatcatgtttatacttttattaggtggaccacacaggagaatatggaaatctggtgactatacagtcatttaaagcagaatttcgcttagcaggaggtgtaaatttaccaaaaataatagattgtgtaggttccgatggcaaggagaggagacagcttgttaaggtgagccttcccttctctggcttagcccttagagttttagtgatgaaaatttttagttcatattttctttctgctttatttgggattttgtctttattttgaatacttacaaatgaggaagatttgtagagtagaaatgcattattttctagaaccaggcttttctccattttttttgtgtctctgaaagacaatcattattatatggttgattcaagtaaaagaataccattaacatgtacagacatgtacagtgaggttgcttcttatgaaaaaaaatactttggtgtctgtctcttatttccttgaatagtgcaagttgacgtcctttgcatcagtataccgggtctcgtactgtgccaagtgctatttaatgtaccaaaaagggagagcattcttcccttaccatttgctgacgagctctttgggtcctactggggagtggtggaaagacacagtgctgttttactcaggtgtttgcagtatgccttcctaggggg

SEQ ID NO: 77 - DNA, 1117 bp, Homo sapiens
catgtacagacatgtacagtgaggttgcttcttatgaaaaaaaatactttggtgtctgtctcttatttccttgaatagtgcaagttgacgtcctttgcatcagtataccgggtctcgtactgtgccaagtgctatttaatgtaccaaaaagggagagcattcttcccttaccatttgctgacgagctctttgggtcctactggggagtggtggaaagacacagtgctgttttactcaggtgtttgcagtatgccttcctaggggggacttccagttaatctaattacagaagtagcgaggggaaactttctaaatcagtgtaaatgttgtagcttattctaaatgaaagaatggcagtaggtatttaattatttgggagactgtcaagaggtgcacagatgctcagattggtttgagtgccctttgctattctcagatgactctgtgtttttataataaaataaactgtacttgtttattcatgcttaattattctgaagggccgtgatgacctgagacaagatgctgtcatgcaacaggtcttccagatgtgtaatacattactgcagagaaacacggaaactaggaagaggaaattaactatctgtacttataaggtaactatttgtacttctgttagttcaccaaaaacatataaaagatgccatttggttgggtgaagtggctcatgcccatattcataatgctttgggaggccaaggtgggaggattgcttgaggccaggagttcgagaccagcctcagcaacatagtgagaccccatcttgacaaaaagttaaaaaaaaaaaaaaagccagagatgatggcatgtgcttgtagtcccttagctacatgggaggctgaggtgggaggatcacttgagtccaggagtttgaggctgcagtgagctcaaactctgcagtgagccccagtccagcctgagcaacacagcaagatcccgtttaaaaaagaagaagaagaagaagatgccattatttggaccaggagtctacaaatgttttctgtgaaggaccaaataataaagatttattttctttgtaaaaagtatttattaatgttaattatagttaggtgtttcttatagtcaactgaagtat

SEQ ID NO: 78 - DNA, 1150 bp, Homo sapiens
ttattttatatttaggagtacattttctctctgtgaagataataagactaaagcaagagtacatgtaatttcaataatgaagttacactaaaattgagaccacattcatgggtaataatttccaagtgaaactccccaaatttaattgatactaaaattttaaggaaagcagttaattcctctcctaactggacaaactaagtatggattaatgacagatgacggtgagtatagttaacaggagtgacctctcagagaatcgtggggattgagtgatgggcaggctctcaaacatctaggcagcaggctggaaaattatattctttgagcttaagtttatttccgattggtttcctccaaggagctttgtcttctatggacagagaaatattaatacaacttgaaaaaaaatgctttgcactgactctgatagctgaatgatcatcaaatgctctttaatggccttttaaaattaaaaggtatttaatctgtaactccaggtggttcccctctctcagcgaagtggtgttcttgaatggtgcacaggaactgtccccattggtgaatttcttgttaacaatgaagatggtgctcataaaagatacaggccaaatgatttcagtgcctttcagtgccaaaagaaaatgatggtgagtgacacccaaaattaaaggttattgtaagattatttaatggcttattaaagctgacagctgtcagatattatagaatacaaaaaaactttaatttcatcaggtaattgtcaaagatactaagtaaaagaaaaactcatcagaatgaaagtgtgtgagtgaaaaaggaaggattttaaactacataatatgtcaacccttgtcagataagaaatgtaaaggttattcaatgtgtgctgatttgttttcaatttgggataaactaattcttagcaaacaaaacactaaaatgccaggcacgatggcatgcacctgtaatcccagctacttgagaggctgagtctgggggatcccttgaacccaggattttgaggccagcctgggcaacagagcaagaccccatctctaaaaaacaaacacagtaaacaacaacaacaacaagattatgaagtaattttttatgaaactgatatagaaaaccttctgagacatttaca

SEQ ID NO: 79 - DNA, 1166 bp, Homo sapiens
aaatcatcagcacatagatggaagggagttgaagtcggtaagctttgcttcaggtagtattttatggcaagaagatgttggaggatagagatctgagtcatatcagctgccatctatgagggattcttctgttctttctcttttcctgttttctattgcaacccaatgctgtgatgccacctgaggttatctggaactacttaggcatttctgtgtttatttctgcttaagagtacaggattattcaaattagaatttaatcaaaacaagtaacagtcactgtaggtgtgcttcctcccccaacaattaatatggaaatcctaaagggattatcacttgtaattaattgcttccctgtccagactgttagcttcttgtaggtaatgtatcctgttcatctttattgcccctatatctgtcatatttttatataaaaatgtgtatattagtttaattgaacacaatattgaaaaataattatatatattctctatttaaaggaggtgcaaaaaaagtcttttgaagagaaatatgaagtcttcatggatgtttgccaaaattttcaaccagttttccgttacttctgcatggaaaaattcttggatccagctatttggtttgagaagcgattggcttatacgcgcagtgtagctacttcttctattggtaatcttcttgtacatatagtagattgagcactttgttgtttggcaggttttatttttgtttgattcagcactttttctacattctgagttgcagggggatgatagtgatgatgtggttagtaaccaacccatcttcattattaaatcatatgtttcttgttcatcctgattcttagtgtctacctttttataacttatgcagaagagaattctcctacttcaataaataataaaaagacagggttttcttctttgttttatagtgaatatggcatattttctctcctctcaatatattattttctgagactttctttggaaaataatgaaacctgtgataacttatttcctttaattatttttgttcttttgcatataacctctaaatatcatcacctagtgattaatactttttaatagaattttgttttcagaatagaaaccatgagatatatttaaatattttgtgtacaatatatattttgactttttttccct

SEQ ID NO: 80 - DNA, 1087 bp, Homo sapiens
atacagaaatgcagttttttggggggatacacacctggtgaaatgaattaatgattaatttgtgttaaatataattcatcaaggagaagaaagtttcactgaagagtgaagagtttatccatagacttctcattttataagtatgttcaataaaaatttgagtacatataatgcacagctttgacccaggtaaataatgggtctcaactttagccacaataattttttaagtactaatattttaaaatgtgtgcctattagtaaagagaaaatttttttagcaaatcatctaggatttgtaaaatgcaatatgcattaaaatagctggcaagatttgagttaaactcaacatggccggttatgcacatcatttaagtaggctaaaaatcctaaactacttaaagattataccaagtcagtggtcttaattgaaattatggctatatattagaaagagatggaatcagtgatttcagattgtttgtttcttttttctccagttggttacatacttggacttggtgatagacatgtacagaatatcttgataaatgagcagtcagcagaacttgtacatatagatctaggtaagtaataaaatctatgtatctattctttttagtaaatatttggtcatcatggaatgttgtttgcctaccaagatattacaaatataagagacagataaattgaagcagtaaatattgggtttttttgttttcagcataaacagttgtcctagaagaaacagttaactctgcctggggtactgagtgaaacttaatagatgaggtgtcttttgagcctggtcttcaagaaagaaagaaagcataattcagacagaagatagagcagattcaaaagaaggaatcagggctattccaccaaaacaaggagtaattttaagatgtagcatgttgtgggagtggtgagacattaaatgtgtctggagtgaagtaagcctgtagttgagtcgcttgagagagagattggtactagactgtaaaaagccaggctaaggagtttcaacttcattgcattaaactataggaaataaatgaaggacatgataatattttattttcag

SEQ ID NO: 81 - DNA, 1115 bp, Homo sapiens
agcctcccgagtaactgggattataggcacctgctaccacacccagctaatttttgtatttttagtggagacaaggtttcaccatgttggccaggctggtctcttaactcctgacctcaggtgtcaggcctcctcagcctcaaggtgctgggattacaggcgggagccaccacacccagcctaaaaattttttaaatataaatatatcatctccattttaaattataccagtagttacttcatttttaaaaatcaccctttaacctagatttctctagttgggttaagaagtagttaggttatttggatttgaggtggatctcacagacagtgacaaagatgaggaaggcagccagagcagaagtaaactactgtacatactagtgttcatagaacgtaggtaacatgtggtttcttgcctttgtaaagttcacattctaactggaaagaaagtaaattagctgtcaaacctcctaacttcactgtattctttactttaggtgttgcttttgaacagggcaaaatccttcctactcctgagacagttccttttagactcaccagagatattgtggatggcatgggcattacgggtgttgaaggtgtcttcagaaggtaagtgatatgaagtaaaggagggaaataatttttgatgtcaaaattacatgggctgggcatggttctttgcacctgtaatcccagctgctcaagaggctgaagtgggaggattgtttgagcccaggagtttgagtccagcctaggcaatacagcaagaccctgtatctaaaaaaatacacacacacaaacacacacacacacacacacacacacacacacacacgggttagagatttgtatagattatagaatttagtgctagaatcgtattccagtgccttatcaatactaaggaaaagaccctgggtaaaagcaataatagttcctcttccttccacccacctgggacctaagcccatgtaacatacatactgttattccaaacctcctctggaagcatcccacctttacttttaacacctctatcctggctgactccttcttaatgatccaaactactattgggtgctcatcactgtgcatatagaagagactac

SEQ ID NO: 82 - DNA, 1064 bp, Homo sapiens
ctggctgactccttcttaatgatccaaactactattgggtgctcatcactgtgcatatagaagagactacatttttatttataggagcttgtgttctagtataacattgtgctactaaaaaagctttgcagttccttgtagttttcccagcataggtctgtgtactcaacttggattggggcagattgcagtcagtgtaaactaataattgccacaataatcaaagactgagagctgagcccagtggtgcatgcctgtaatcaatagtgttgtgttattcttgtaaatgccaagcttgtgaaatagtcaaatacatatttgtattcatttcaaacgtctaatgaaagcccactctgccaagtattatgctattttgagatacagatatgtagattattaagcataggctcagcatactacacatgagagtatacagataaagatacgttgacaacattggtgtgtaacaaaatccgtatttataatgtgtttgactctagatgctgtgagaaaaccatggaagtgatgagaaactctcaggaaactctgttaaccattgtagaggtaaagtattttataaggaagactttattttttttcttaccaggtagactgtgtatctcatcaggaagtcactgatgtgaagagcactgcttcattttaacatagggggatgtggctgggcagcagaaaggaggagattgtgcacttagccttttcacacatccaaaaatactggtttagaaatgccttcagcccccttgagtttcttggaatgttagagcattgtaagtagtctctagttttcaattcataaatcaattctttgacatttagatattccatatggtattattattttcagaatggtttccattagggtttaagaaaaatcagaaatttatatctcctttttccctgctcaggttcagaactaattagtcagacaaatggagatcaaattgtcagcatcattactagaggaacatggcttaggaatgagggccagactagtttactgctggtgctacctcagtacctctctgctgtcttaactttgggac

SEQ ID NO: 83 - DNA, 1137 bp, Homo sapiens
gccataggaatagggtggagatcagaatttcagatttgttactgataaaactattggagaagacggcttaggagtgaggtccaaataggcttgctggtgctctccagttcccacatcccaatctataccttgagacagcctgggctgaggaagaattgggccctacaaagcaaatacactaacccagggttaagagtagagagagaaggaaagaaagtgactaaccttttaatagattagtttcatccagtcaggaaacatgggtcaagggatgtcacccctaaccatggaggaagaatgaattcagaatgaaatgagaagcttggagcattatgctaggatagtttcctcaaggaaacatgaagtgtgcatgatgtttgttcccctcccccatcaactaccatgtgactggcttatttgtatgatactggttctactgtttctaagtatgtgattaaaatgtacattgttcttttaatacatatgttctctctgtttaggtccttctatatgatccactctttgactggaccatgaatcctttgaaagctttgtatttacagcagaggccggaagatgaaactgagcttcaccctactctgaatgcagatgaccaagaatgcaaacgaaatctcaggtgagcagtattttaagaaggtcctgttgtcagtttttcagattttcttattcccaaggcctttaaactgttcacctcactgaaacctttgtgtttttgtccttagtgatattgaccagagtttcaacaaagtagctgaacgtgtcttaatgagactacaagagaaactgaaaggagtggaagaaggcactgtgctcagtgttggtggacaagtgaatttgctcatacagcaggccatagaccccaaaaatctcagccgacttttcccaggatggaaagcttgggtgtgatcttcagtatatgaattaccctttcattcagcctttagaaattatattttagcctttatttttaacctgccaacatactttaagtagggattaatatttaagtgaactattgtgggtttttttgaatgttggttttaatacttgatttaatcaccactcaaaaatgttttgatggtcttaaggaacatctctgctttcactctttagaaa

SEQ ID NO: 84 - DNA, 4775 bp, Homo sapiens
catccagtcaggaaacatgggtcaagggatgtcacccctaaccatggaggaagaatgaattcagaatgaaatgagaagcttggagcattatgctaggatagtttcctcaaggaaacatgaagtgtgcatgatgtttgttcccctcccccatcaactaccatgtgactggcttatttgtatgatactggttctactgtttctaagtatgtgattaaaatgtacattgttcttttaatacatatgttctctctgtttaggtccttctatatgatccactctttgactggaccatgaatcctttgaaagctttgtatttacagcagaggccggaagatgaaactgagcttcaccctactctgaatgcagatgaccaagaatgcaaacgaaatctcaggtgagcagtattttaagaaggtcctgttgtcagtttttcagattttcttattcccaaggcctttaaactgttcacctcactgaaacctttgtgtttttgtccttagtgatattgaccagagtttcaacaaagtagctgaacgtgtcttaatgagactacaagagaaactgaaaggagtggaagaaggcactgtgctcagtgttggtggacaagtgaatttgctcatacagcaggccatagaccccaaaaatctcagccgacttttcccaggatggaaagcttgggtgtgatcttcagtatatgaattaccctttcattcagcctttagaaattatattttagcctttatttttaacctgccaacatactttaagtagggattaatatttaagtgaactattgtgggtttttttgaatgttggttttaatacttgatttaatcaccactcaaaaatgttttgatggtcttaaggaacatctctgctttcactctttagaaataatggtcattcgggctgggcgcagcggctcacgcctgtaatcccagcactttgggaggccgaggtgagcggatcacaaggtcaggagttcgagaccagcctggccaagagaccagcctggccagtatggtgaaaccctgtctctactaaaaatacaaaaattagccgagcatggtggcgggcacctgtaatcccagctactcgagaggctgaggcaggagaatctcttgaacctgggaggtgaaggttgctgtgggccaaaatcatgccattgcactccagcctgggtgacaagagcgaaactccatctcaaaaaaaaaaaaaaaaaaacagaaacgtatttggatttttcctagtaagatcactcagtgttactaaataatgaagttgttatggagaacaaatttcaaagacacagttagtgtagttactatttttttaagtgtgtattaaaacttctcattctattctctttatcttttaagcccttctgtactgtccatgtatgttatctttctgtgataacttcatagattgccttctagttcatgaattctcttgtcagatgtatataatctcttttaccctatccattgggcttcttctttcagaaattgtttttcatttctaattatgcatcatttttcagatctctgtttcttgatgtcatttttaatgtttttttaatgttttttatgtcactaattattttaaatgtctgtacttgatagacactgtaatagttctattaaatttagttcctgctgtttatatctgttgatttttgtatttgataggctgttcatccagttttgtctttttgaaaagtgagtttattttcagcaaggctttatctatgggaatcttgagtgtctgtttatgtcatattcccagggctgttgctgcacacaagcccattcttattttaatttcttggctttagggtttccatacctgaagtgtagcataaatactgataggagatttcccaggccaaggcaaacacacttcctcctcatctccttgtgctagtgggcagaatatttgattgatgcctttttcactgagagtataagcttccatgtgtcccacctttatggcaggggtggaaggaggtacatttaattcccactgcctgcctttggcaagccctgggttctttgctccccatatagatgtctaagctaaaagccgtgggttaatgagactggcaaattgttccaggacagctacagcatcagctcacatattcacctctctggtttttcattcccctcatttttttctgagacagagtcttgctctgtcacccaggctggagtgcagtggcatgatctcagctcactgaaacctctgcctcctgggttcaagcaattctcctgcctcagcctcccgagtagctgggactacaggcgtgtgccaacacgcccggctaattttttgtatttttattagagacggagtttcaccgtgttagccaggatggtctcgatcgcttgacctcgtgatccaccctcctcggcctcccaaagtgctgggattacaggtgtgagccaccgcgcccggcctcattcccctcatttttgaccgtaaggatttcccctttcttgtaagttctgctatgtatttaaaagaatgttttctacattttatccagcatttctctgtgttctgttggaagggaagggcttaggtatctagtttgatacataggtagaagtggaacatttctctgtcccccagctgtcatcatataagataaacatcagataaaaagccacctgaaagtaaaactactgactcgtgtattagtgagtataatctcttctccatccttaggaaaatgttcatcccagctgcggagattaacaaatgggtgattgagctttctcctcgtatttggaccttgaaggttatataaatttttttcttatgaagagttggcatttctttttattgccaatggcaggcactcattcatatttgatctcctcaccttcccctcccctaaaaccaatctccagaactttttggactataaatttcttggtttgacttctggagaactgttcagaatattactttgcatttcaaattacaaacttaccttggtgtatctttttcttacaagctgcctaaatgaatatttggtatatattggtagttttattactatagtaaatcaaggaaatgcagtaaacttaaaatgtctttaagaaagccctgaaatcttcatgggtgaaattagaaattatcaactagataatagtatagataaatgaatttgtagctaattcttgctagttgttgcatccagagagctttgaataacatcattaatctactctttagccttgcatggtatgctatgaggctcctgttctgttcaagtattctaatcaatggctttgaaaagtttatcaaatttacatacagatcacaagcctaggagaaataactaattcacagatgacagaattaagattataaaagattttttttttgtaattttagtagagacagggttgccattgtattccagccttggcgacagagcaagactctgcctcaaaaaaaaaaaaaaaaaggttttggcaagctggaactctttctgcaaatgactaagatagaaaactgccaaggacaaatgaggagtagttagattttgaaaatattaatcatagaatagttgttgtatgctaagtcactgacccatattatgtacagcatttctgatctttactttgcaagattagtgatactatcccaatacactgctggagaaatcagaatttggagaaataagttgtccaaggcaagaagatagtaaattataagtacaagtgtaatatggacagtatctaacttgaaaagatttcaggcgaaaagaatctggggtttgccagtcagttgctcaaaaggtcaatgaaaaccaaatagtgaagctatcagagaagctaataaattatagactgcttgaacagttgtgtccagattaagggagataatagctttcccaccctactttgtgcaggtcatacctccccaaagtgtttacctaatcagtaggttcacaaactcttggtcattatagtatatgcctaaaatgtatgcacttaggaatgctaaaaatttaaatatggtctaaagcaaataaaagcaaagaggaaaaactttggacagcgtaaagactagaatagtcttttaaaaagaaagccagtatattggtttgaaatatagagatgtgtcccaatttcaagtattttaattgcaccttaatgaaattatctattttctatagattttagtactattgaatgtattactttactgttacctgaatttattataaagtgtttttgaataaataattctaaaagcatatactaagactcattcactttattcaaatatttgtgtgttctgtgtgccaggcatgggactcgttctaaggagaaagcagtgagcaaggcaggcatagtctgcctatataaagctcccaatctgaggaggataggcaactgaccacgcagtgtgaaccggggagcctattgcacaaccagtctgataatgctgcatctcagtctaaatatcctagtagtgtttcttagtcgcctcctgacgaaaaggcaaatatgaatgttctttctttgggcctagaaagtgatctagttgacatttctagcctaaaagatctgtactagaatatgacaagtgcaaagatcctggtatcctaaatgcaaagttttttacctgtttatcatatttttaaaataaattcagtcctctggagttttagtctcttttgcctagattttaacaaaatgcattttgcataaatatagtggagtcaaagtttccacaaagattataatgactca

SEQ ID NO: 85 - DNA, 1500 bp, Homo sapiens
gcgaaaagaatctggggtttgccagtcagttgctcaaaaggtcaatgaaaaccaaatagtgaagctatcagagaagctaataaattatagactgcttgaacagttgtgtccagattaagggagataatagctttcccaccctactttgtgcaggtcatacctccccaaagtgtttacctaatcagtaggttcacaaactcttggtcattatagtatatgcctaaaatgtatgcacttaggaatgctaaaaatttaaatatggtctaaagcaaataaaagcaaagaggaaaaactttggacagcgtaaagactagaatagtcttttaaaaagaaagccagtatattggtttgaaatatagagatgtgtcccaatttcaagtattttaattgcaccttaatgaaattatctattttctatagattttagtactattgaatgtattactttactgttacctgaatttattataaagtgtttttgaataaataattctaaaagcatatactaagactcattcactttattcaaatatttgtgtgttctgtgtgccaggcatgggactcgttctaaggagaaagcagtgagcaaggcaggcatagtctgcctatataaagctcccaatctgaggaggataggcaactgaccacgcagtgtgaaccggggagcctattgcacaaccagtctgataatgctgcatctcagtctaaatatcctagtagtgtttcttagtcgcctcctgacgaaaaggcaaatatgaatgttctttctttgggcctagaaagtgatctagttgacatttctagcctaaaagatctgtactagaatatgacaagtgcaaagatcctggtatcctaaatgcaaagttttttacctgtttatcatatttttaaaataaattcagtcctctggagttttagtctcttttgcctagattttaacaaaatgcattttgcataaatatagtggagtcaaagtttccacaaagattataatgactcagaatttggtaagtaaggagatctcataatagacattatcctctgaaaaatccctttgccattaaaagtacagcatacacagttttatgtacaacagtatgtagaaatatatactttcattgtgtatgatccaaaagcagtggttcttaaccaggggtgattttgctgcctcacttgatattttcaaaataaagttattgttattttgatgggaacaaaatggtatcatgtctcattttaatttgtacctcactaattactagggagattaaatgttttagtatacacttgttagtcagtatgattttctctgatgaactgcctgtacgtattctttgctgatatttctactgatcctttgttggttatgtaacatcttagctaacatcttttccaattctgtagcttgtctcttcattctcttaatggagtttttttggttgacagacatttttattagtgttttcattaaggttaaatctttcaggtagggattttccc

SEQ ID NO: 86 - DNA, 2593 bp, Homo sapiens
cctctggcggcccgccgtcccagacgcgggaagagcttggccggtttcgagtcgctggcctgcagcttccctgtggtttcccgaggcttccttgcttcccgctctgcgaggagcctttcatccgaaggcgggacgatgccggataatcggcagccgaggaaccggcagccgaggatccgctccgggaacgagcctcgttccgcgcccgccatggaaccggatggtcgcggtgcctgggcccacagtcgcgccgcgctcgaccgcctggagaagctgctgcgctgctcgcgttgtactaacattctgagagagcctgtgtgtttaggaggatgtgagcacatcttctgtagtaattgtgtaagtgactgcattggaactggatgtccagtgtgttacaccccggcctggatacaagacttgaagataaatagacaactggacagcatgattcaactttgtagtaagcttcgaaatttgctacatgacaatgagctgtcagatttgaaagaagataaacctaggaaaagtttgtttaatgatgcaggaaacaagaagaattcaattaaaatgtggtttagccctcgaagtaagaaagtcagatatgttgtgagtaaagcttcagtgcaaacccagcctgcaataaaaaaagatgcaagtgctcagcaagactcatatgaatttgtttccccaagtcctcctgcagatgtttctgagagggctaaaaaggcttctgcaagatctggaaaaaagcaaaaaaagaaaactttagctgaaatcaaccaaaaatggaatttagaggcagaaaaagaagatggtgaatttgactccaaagaggaatctaagcaaaagctggtatccttctgtagccaaccatctgttatctccagtcctcagataaatggtgaaatagacttactagcaagtggctccttgacagaatctgaatgttttggaagtttaactgaagtctctttaccattggctgagcaaatagagtctccagacactaagagcaggaatgaagtagtgactcctgagaaggtctgcaaaaattatcttacatctaagaaatctttgccattagaaaataatggaaaacgtggccatcacaatagactttccagtcccatttctaagagatgtagaaccagcattctgagcaccagtggagattttgttaagcaaacggtgccctcagaaaatataccattgcctgaatgttcttcaccaccttcatgcaaacgtaaagttggtggtacatcagggaggaaaaacagtaacatgtccgatgaattcattagtctttcaccaggtacaccaccttctacattaagtagttcaagttacaggcgagtgatgtctagtccctcagcaatgaagctgttgcccaatatggctgtgaaaagaaatcatagaggagagactttgctccatattgcttctattaagggcgacataccttctgttgaataccttttacaaaatggaagtgatccaaatgttaaagaccatgctggatggacaccattgcatgaagcttgcaatcatgggcacctgaaggtagtggaattattgctccagcataaggcattggtgaacaccaccgggtatcaaaatgactcaccacttcacgatgcagccaagaatgggcatgtggatatagtcaagctgttactttcctatggagcctccagaaatgctgttaatatatttggtctgcggcctgtcgattatacagatgatgaaagtatgaaatcgctattgctgctaccagagaagaatgaatcatcctcagctagccactgctcagtaatgaacactgggcagcgtagggatggacctcttgtacttataggcagtgggctgtcttcagaacaacagaaaatgctcagtgagcttgcagtaattcttaaggctaaaaaatatactgagtttgacagtacagtaactcatgttgttgttcctggtgatgcagttcaaagtaccttgaagtgtatgcttgggattctcaatggatgctggattctaaaatttgaatgggtaaaagcatgtctacgaagaaaagtatgtgaacaggaagaaaagtatgaaattcctgaaggtccacgcagaagcaggctcaacagagaacagctgttgccaaagctgtttgatggatgctacttctatttgtggggaaccttcaaacaccatccaaaggacaaccttattaagctcgtcactgcaggtgggggccagatcctcagtagaaagcccaagccagacagtgacgtgactcagaccatcaatacagtcgcataccatgcgagacccgattctgatcagcgcttctgcacacagtatatcatctatgaagatttgtgtaattatcacccagagagggttcggcagggcaaagtctggaaggctccttcgagctggtttatagactgtgtgatgtcctttgagttgcttcctcttgacagctgaatattataccagatgaacatttcaaattgaatttgcacggtttgtgagagcccagtcattgtactgtttttaatgttcacatttttacaaataggtagagtcattcatatttgtctttgaatca

SEQ ID NO: 87 - DNA, 1500 bp, Homo sapiens
ggttgctctgtaggtcttatctgtaaattacggcgatcagtgaaagatctggaggaggaaggtggacacactctctaacaaaaaaaaccctttttgaaattttataccaatattttaaaagtaaaccagatcttttcagacatgcctttgagctgatatttgttaactagttagaattagaaactttccttatttttactcagttacaatatacgccacagctgaggtgagaggaaagaaaaggttgctttcttaggaacaaagagtggtaccttcagtatcgtgggcaaagcttttccaagtccaacagcagtcaaaacagcgctttttataaataacactcagctaaaagtttctgggtttgtgattgttccaacggttaagctcggatgagggtccctggagtcgtagctcccgggaaacgtcgactggctttccacctggacttcatccgtccaggcagcccagaggggcttcaggccccgcccgctctcctgccaactacagcctcgcgactgcgctcagccttcaggccccgccccttcggtcaagcggcgtgctctcactgcacggcgcctgggccccgcgcgccgggacctcggtttcagccgtcctgtcctgccccgaggcccctaggccccgcccctgggccccgcgcgccaggacttcggtttcgaccgtcctgtcccgccccgaggctcctaggccccgccccctctgtccccggcgtgttctcgcggctccgcccctaggacccgcgcgccgggactttggcaagtttcagccgtccggccccgccccctcggtcccacggctctcgcggcccctcccctaagtcccacacgccgggactttggcaagtttcagcctccagccccacccctaggtcccgcccactcggccagcggctggctctcgcggccccgcccctgtgccctgcgagtccctattttgggagcattgcggccgccgtgccccgcccctccccgcgcgccccgcccctctggcggcccgccgtcccagacgcgggaagagcttggccggtttcgagtcgctggcctgcagcttccctgtggtttcccgaggcttccttgcttcccgctctgcgaggagcctttcatccgaaggcgggacgatgccggataatcggcagccgaggaaccggcagccgaggatccgctccgggaacgagcctcgttccgcgcccgccatggaaccggatggtcgcggtgcctgggcccacagtcgcgccgcgctcgaccgcctggagaagctgctgcgctgctcgcgttggtaaagacggagcttcttgggggtggctgcgagggcacgggtcgcacagtttctgggggcggcagaatcttttcaaatcttccgtttcctccttccgttcccgcgctgcagtcgggtcggcgtgcggttagcacctgccgggggatatagtattaacaacttctgcttctcattcactttatttttgggcgacttaccggcctcccc

SEQ ID NO: 88 - DNA, 1293 bp, Homo sapiens
actacagcctcgcgactgcgctcagccttcaggccccgccccttcggtcaagcggcgtgctctcactgcacggcgcctgggccccgcgcgccgggacctcggtttcagccgtcctgtcctgccccgaggcccctaggccccgcccctgggccccgcgcgccaggacttcggtttcgaccgtcctgtcccgccccgaggctcctaggccccgccccctctgtccccggcgtgttctcgcggctccgcccctaggacccgcgcgccgggactttggcaagtttcagccgtccggccccgccccctcggtcccacggctctcgcggcccctcccctaagtcccacacgccgggactttggcaagtttcagcctccagccccacccctaggtcccgcccactcggccagcggctggctctcgcggccccgcccctgtgccctgcgagtccctattttgggagcattgcggccgccgtgccccgcccctccccgcgcgccccgcccctctggcggcccgccgtcccagacgcgggaagagcttggccggtttcgagtcgctggcctgcagcttccctgtggtttcccgaggcttccttgcttcccgctctgcgaggagcctttcatccgaaggcgggacgatgccggataatcggcagccgaggaaccggcagccgaggatccgctccgggaacgagcctcgttccgcgcccgccatggaaccggatggtcgcggtgcctgggcccacagtcgcgccgcgctcgaccgcctggagaagctgctgcgctgctcgcgttggtaaagacggagcttcttgggggtggctgcgagggcacgggtcgcacagtttctgggggcggcagaatcttttcaaatcttccgtttcctccttccgttcccgcgctgcagtcgggtcggcgtgcggttagcacctgccgggggatatagtattaacaacttctgcttctcattcactttatttttgggcgacttaccggcctccccttgccctgaatccaactgaaacggtagtttttgaacttcagcgggctgaagaaccgtctggaggtgtggctaaaaaaatgttcatcccggtcgcgcctccagagtttgaatcgggctggggtggggctgaggcttctgcattttttacccggccctggattaccccgctgctttccgggagctgtggcgaattgggctggcgggccgccccggagaccctctaaattagaagcagctgccactctaagttaaactggcctttttgacattttctccgtgccagctttttcgag

SEQ ID NO: 89 - DNA, 1057 bp, Homo sapiens
cagtcctggtttattcctgttgtcccagcatcctattcaattatcactcctcttcactctcagaagttttctcatttggatgatacgttatatggtcattctacgtgtgggacacattttgaggtatatggtctacactttgaatcataaggggaagatacaccttagtagttgaaagaagcagccagtagttggttttgccttaagaggtttagagatacttgaacaaaattgttcctttctccaactttctagaaaatacattttaaaatgtattacaacttgtacccagtttggtggttactatttaaaatcatcaggtatgttatggtacaatatttaaccagggagtaacagcctttcaaatgaatgcatccttaataccttctgctttgagaaagtgagaaatatggtagtgttgggccttggatgaaatattgggtgtgagatgtttatctaacaatgactcaaatcttgattgttttaatttcttcaaacagtactaacattctgagagagcctgtgtgtttaggaggatgtgagcacatcttctgtaggtaagtaattacggtttgatgtatatagtacaactgtattttttactagataacaatcatgtaatcttgttgataataatggtacttgatgtttgtgtaactttcaaagtctgcaaagtaacctattgtacattatcttagtttgatctttaaaactgtgtcttaatttacaaataagaaaaccaaagctcaaagaggatgacttgtccaagttacaaagcttagtagacagctttgccaaattggaggaaaaaaattaatgccttttatataattcaaatagatgtttttaaattttccagttaaattttgaatctagactcaaaattgtgaaagtataggtcttacagttattatattagtttcctaaggctgccataacaaagaaccaaaaactgggtggcttagaacaacagaaatgtattgtctctctagttctgtaggctaggagtctaagatcaagatgatgacagggttggttccttctgtgggctgtgagg

SEQ ID NO: 90 - DNA, 1149 bp, Homo sapiens
gataacccaggtaattgagtctacaggttttaaaattgtctgaaaaagtcaaagatcttttcccaaaagctactttaaagccttgagatactagtcccaaaacaaaacagaaggtctttcccagtgtctgcagtagttttgggtattttcatgcaatgttaagatagaaaaagttaggatgcacgactactatgcattaggcattctatctttctgttacatctctgtaacctttagaagctacagatttatttgtagggaaaattatgcagactaataatcaggctaagtaaagtctcttcatagcaaattacatgagcaaccttagatttgatgtatgtattttactctttaaaacagtattcaacaaggatattacaattgaccattgtatgttagaataacctctgctccatttatttctgttcaaactgtttagtttttggaattaaattctgctgaatgggttgcttttttttttttttttaattattttaaagtaattgtgtaagtgactgcattggaactggatgtccagtgtgttacaccccggcctggatacaagacttgaagataaatagacaactggacagcatgattcaactttgtagtaagcttcgaaatttgctacatgacaatgagctgtcaggtaagaactatccctatctctcttagttaaattcatcagttaaaaactgatgaattcatattcataaagtatataaaacatctatctggagttctggaatacgtatttcagattttaaaatctgtaggttttttttttttttttttaaatagccattgagtctctctatgttgtccaagccggacttgaactcctgcactcaagggattccccccacctcagcctccctggtacatgcatgtgacacacccggtggttttttggaagatcattttgagaaatgacgggaaccatagagataattaaagtctaacccccttattttatagttgagaaatcaaggtccagagaggtgaaataaccttgcctacagccgcatgtgtagttagtactagaagctggagaaataaagcccatttctgactgtaaatccaggaacttttttgctgctttacattgcctgctttttacatttatgataacttctgcagaatatatat

SEQ ID NO: 91 - DNA, 1950 bp, Homo sapiens
tttccgtgtaaattttataattgcttgtcgagttttacaaacaagcctactggaaattacattgggatttgttatatctgtaaatctgtttggaacaattggcatcttaacaatattgttatagttcatgaacatggtatatctctccatttgtgtagaattctttaataagtattttgtaattcttagcaaacagaacttatacattctgttagatttgtattttatgggtttttttgggtactatatttggaatataagtttcatgttttgttctctgctatatcttcagtctctaggatatggcacaaagtcggattcagtaagtattgaatgagtgaatatctgctatcaaagagttcacactctaggagctgagaaagaagtacataattaaaagatgatacactttaggggaactgtaaacaaaattcttcgggagctccatgtgggagcaataaatttcatgtaacagatttctttttctttttttctgtcagatttgaaagaagataaacctaggaaaagtttgtttaatgatgcaggaaacaagaagaattcaattaaaatgtggtttagccctcgaagtaagaaagtcagatatgttgtgagtaaagcttcagtgcaaacccagcctgcaataaaaaaagatgcaagtgctcagcaagactcatatgaatttgtttccccaagtcctcctgcagatgtttctgagagggctaaaaaggcttctgcaagatctggaaaaaagcaaaaaaagaaaactttagctgaaatcaaccaaaaatggaatttagaggcagaaaaagaagatggtgaatttgactccaaagaggaatctaagcaaaagctggtatccttctgtagccaaccatctgttatctccagtcctcagataaatggtgaaatagacttactagcaagtggctccttgacagaatctgaatgttttggaagtttaactgaagtctctttaccattggctgagcaaatagagtctccagacactaagagcaggaatgaagtagtgactcctgagaaggtctgcaaaaattatcttacatctaagaaatctttgccattagaaaataatggaaaacgtggccatcacaatagactttccagtcccatttctaagagatgtagaaccagcattctgagcaccagtggagattttgttaagcaaacggtgccctcagaaaatataccattgcctgaatgttcttcaccaccttcatgcaaacgtaaagttggtggtacatcagggaggaaaaacagtaacatgtccgatgaattcattagtctttcaccaggtacaccaccttctacattaagtagttcaagttacaggcgagtgatgtctagtccctcagcaatgaagctgttgcccaatatggctgtgaaaagaaatcatagaggagagactttgctccatattgcttctattaaggtaggatgcttactctgaaataccatctcagaatgaggccaactataaagcaatttctttgcagtttttgaaaaatggcataggattactaggataattaacctttcacagacatgatacttcctctgaaccagagaagccagattcatagggagagcatctctacttcagttggagcagtggcccctgagtctgggcgcatgatcttgtaggagaaaaccaatatttgaatatttcggcttttattttgccaagtgcttttgcttttgtctattttaccttcagtttttatcattttgtttacctgtcttcatgctttatgaatgtagacaattgctaagttattacaggcaacaatgtttacttagtaaaaaagcccatatttaccatccaaattcaaccaaaatttggaaggttgaaagatgtggtctgtacatttctccaatgaccgggacatttgactatcagaaatggctcctccagttcaccacaaaggagct

SEQ ID NO: 92 - DNA, 1081 bp, Homo sapiens
aagcatgactgtacttcttgatatctcagaataatttatacgcagacaatttcttttttgttttgtttttttgagacggagtcttgctctgtggcccaggctggagtgcagtgacatgatcttggctcactgcaacctctgcctcctgggctcaagtgattctcctgcctcagcctcccaagtagctgggattacaggctggcaccaccatgcccgactagttttgtatttttagtagagacggggtttcaccatgttgaccaggctggtctcaaactcctgacctcaggtgatccacccaccttggcctctcaaagtgttgggattacaggcgtgagccaccacacccggcctaataatttattaactcatgaacagtagccttaagagaaaacgatttaagttttactttatattgaagaaggcagcatttaaaaaagctcaatattttcctttctttccttaatgctttttaatttccgttttgttcatttttctagggcgacataccttctgttgaataccttttacaaaatggaagtgatccaaatgttaaagaccatgctggatggacaccattggtagttgtctggtttttattctcattctttctgtgttttacagttcttatagtttatagttatgtagttgtctatatatcatcctctgccacatatactctttttagtctgaagaacttatgttttcatcaagtatgagaacatgattactttccttctagcttttcatttgtgacaggcaagaaattggttaccttttgacagactacctttagatttaggaatccatttgtactgtactgcagaatttagctaatgtctagaggtaacagctacagctgacatcaggctccattctgtagcactgcatgtcactggaaccaaatttcttggaacaaaaagaggtcggaggaactgagtataggaaagtgatcacaaggaagtaattctcactgagggtctatcttagcctcacttataccctatccaattgtagatatataaggcagtagaaatctttgcttacattaaacatttttaaaggtctttgcttattatta

SEQ ID NO: 93 - DNA, 1173 bp, Homo sapiens
tcctactcgtgttatttctcttatcaataacagcagccatacagcaatttgtaggttcagcaaatagcttatcttaaaagcattccttcacggatacttactttgttgcatgatatgtgtatgtactggtacagattttatgtatcatcttgttattaaatatgtagacttttttcttaatgtgttacatttattgtagaacatttaaggagctaccgttggtttaaaactacattttcttctaaaaaacagaaaagtgcttgacccaaggctcaaatgagaatagcctttctttttttatgagttacacagatcttgattgaaagattattaatagtaactttcactctgtcagcaacttatagtgtttttgagtatttaggtaacaataaatttactgcctgacgtttacatttatttttctaaagtgtgatattataatatcatccattgctctttcttatcacttctttcacttctttttcaaaaaatttaattagcatgaagcttgcaatcatgggcacctgaaggtagtggaattattgctccagcataaggcattggtgaacaccaccgggtatcaaaatgactcaccacttcacgatgcagccaagaatgggcatgtggatatagtcaagctgttactttcctatggagcctccagaaatgctgtgtaagtagttcaacgtaaaaattatttttaaaatggacctatattcttgaatcaaggtgtgtgataaagcagactttaaaatagtcaagttgatggctttcttcactttcacaactaaaattagatgtgatcatcacattctgcactcataatcagccttcatgccctttttatgatacagttggtccttcatattcttgggttctacacttgaggattcagccaactgcagatcaaaaataattgggaaatatcaatgacagatcggataaaaaaaatgtgttacatatataccatggaatactatgcaactacaaaaaagaatgagatcatgtttttttgtgggcacatgatggagctggaggccattatccttagtaaactaacgcatgaacagaaaaccaaataccgcatgttctcacttataagtgagagctaaatgatgagaattcatgaacacaaagaagggaacaacagacaccagagtctacttgagtgtg

SEQ ID NO: 94 - DNA, 1109 bp, Homo sapiens
ttgtatgcacacatgtttaaattaatttttaaagtaccctgttaactatattattaaactgtttgttatgtggcataattttccttctagtagaacaaaatccctgtcctgtgaatttatctaattttttattggtttataaagactatatggcctataatagctatagtaaatgatttttattggcatttgaaagtctgtcacttatagtgattggtgattatgaagccatattttaatatgaataagaatgcagaatacagttgtgaaaaattcataatactatattcagtaaaaacaatccctataatctgatgtcaaactgaaattttacatcatttctcctttgagttcagcagcttttgattctagattcttctgcctaatatgagttctgagtaatttattttagttaaaattgtatattattaaggatgttgaaaaattgagtcgagtcacacatttgacttacttaaacacatctgcacttattttaccagtaatatatttggtctgcggcctgtcgattatacagatgatgaaagtatgaaatcgctattgctgctaccagagaagaatgaatcatcctcagctagccactgctcagtagtaagtatggatttagctttgggacatttatatattttattaaaattggttatgaaaggaacataatagaaaaatttccatttgaccaattgcttacattcaccaaacaattattgagcacttcctgagtattagctactgtggattcaaagacataatcacagtacgaccatctagaaatacttattgagcccactctgtattttaggcagcattcataaaacaatgaatatgactggtagaactcttattctcagggaggagcttaccatctggtgagaggtaggaaagagacaaactgtaaatattgaactaatataaataaaataatttcagacacttagacatgagtgtttcgaagatgttgtagagtgtcgttgggtggaggtagtgggcttctgcaaggccattgctttagctagggtcacagagtggagccttaaagcactgatttgaattgaagcctgaatgttgaagtgaggaggctgccaggtgactat

SEQ ID NO: 95 - DNA, 1133 bp, Homo sapiens
gttttgaggggttactattttgatgctaatttgttttctatctttgaggtcagcactgttctagaagccttggcattctttgatttttcagataatctcagtttaaactaaacaagtttgattttaactctattgggacaagttagtggaggtggaatagggaattgctgattttaagtggatattttaagttacttgggaaaagaaaaagacttactggtgactgaatgaagtaaaaccctagagagacccaatttaaaattgaagaaatgagatgccctgggtatagagagctatcacaattgacattttcttgagggaaaaataaagagaaaaaatttatttaaaaggttctgggtgtagattcaatggaaataattgaaaattattagagtaaactaagtaatgaaattcaagcttatatcaagtaacagtctgtttaatgtctttgtctagtcgtctaatgtttttaacactggtatctccttttatattaacagatgaacactgggcagcgtagggatggacctcttgtacttataggcagtgggctgtcttcagaacaacagaaaatgctcagtgagcttgcagtaattcttaaggctaaaaaatatactgagtttgacagtacaggtgaggattttgaattttgggaggtggggtagaaaaaatgttaaatagatgatccttttggagaactacctttgataatttacatatgttttaaccattgggagatggctgtatactttgcatcttgtaatacatctaaattttttttcagtaataaactacttatagacaacaacgtagttaggaaatgtaaagtttaaaggtttgcatatattttaggacaagacagtatttcagaagagcaaatttgtgacttttgctagtgacaaataaattgttgtgcagtgtaatgtcataatcccttagctgtaatttgaaaataaaaatttgtgtttgccaatatggctttaagatatatggtttatgatctgatttttcatattgatggccaggttagagaactagatactaaatagaagtagtcttacacttaagtgtaaaaattgttgcctttgaagattcagatataagcttacaaaatatagatgagttataagaag

SEQ ID NO: 96 - DNA, 1093 bp, Homo sapiens
gaactacctttgataatttacatatgttttaaccattgggagatggctgtatactttgcatcttgtaatacatctaaattttttttcagtaataaactacttatagacaacaacgtagttaggaaatgtaaagtttaaaggtttgcatatattttaggacaagacagtatttcagaagagcaaatttgtgacttttgctagtgacaaataaattgttgtgcagtgtaatgtcataatcccttagctgtaatttgaaaataaaaatttgtgtttgccaatatggctttaagatatatggtttatgatctgatttttcatattgatggccaggttagagaactagatactaaatagaagtagtcttacacttaagtgtaaaaattgttgcctttgaagattcagatataagcttacaaaatatagatgagttataagaagcaggccaaagaaatactttggcttgtatctttctttctcttactgctttttttgtattttagtaactcatgttgttgttcctggtgatgcagttcaaagtaccttgaagtgtatgcttgggattctcaatggatgctggattctaaaatttgaatgtaagtgttggatttgagagaattaagaaatgaattagactagttttgtttttcatggttattaatgcctgtgattaaggaacttgatgttaattttcttacctctggttagtcactgcattttggaaaagcttctggctgggcgtggtggctcaagcctgtaatcccagcactttgggaggcccaggtgggcggatcacaaggccaggagatcgagatcatcctggctaacacggtgaagccctgtctctactaaaaatacaaaaaaattagccgggcgtggtggcgggcgcctgtagtcccagctacttgggaggctaaggcaggagaatggcgtgaacctgggaggtggagcttgcagtgagccaagatggtgccactgcactccagcctgggcaacagaatgagactctgtctcaaaaaaaagaaaaaaagaaaaagcttctcatatttatggtgtcatttagatgtccttagtaaatgtatatacatatgttctg

SEQ ID NO: 97 - DNA, 1098 bp, Homo sapiens
tgagcttggtgctgtagactaaagcacattccttcatgtcaaatcacttacagtttaacagacgattagacatataactgtcaaaatgagcagtatagatggtaagtgctcagtttaggttattgtgtcatggactttttattcaccttaattttgggtaattgctatgagtggaaatgtagacttttatttttgtctttgaaatagtatcctggcttaggtttttcagaaaggagattaaaattacagttagtgttcagtactaacttatggcttaatcctccaaagaaagagttttttaaaatattttctttatatgggaaaaccagttgtattacattttgttttggcataagtaagatttctgtttgcattttagaataatacttaaaaactgccatgaagaagaaaaaccacttaggtaaattgcttgattttaatgagagagatatagtgctcacttgatacttagtttgctttaattcttgtgtttttgtcaggggtaaaagcatgtctacgaagaaaagtatgtgaacaggaagaaaagtatgaaattcctgaaggtccacgcagaagcaggctcaacagagaacagctggtatttttcttttaatacaactttcattgttcttattatgacatactattattatcaccatcaggaagaacttctgccctttcaacagctacaggtgactgattaaaattttaattgtgcttatttcaagcacttgattctgaaagatgatcacgatgagcagtaaaatccagaaggtaataatttcatactgttaatggatttttggcatcttgaacattgccataaacctttcagaatctgaggtaaatctcagatacaggaagtagcttgaaagaagacttacagctgctgcttggatttagttaccatatgtctctatggccacatattgtagctttaatggataatatcgcattatcctgttgatattatataagtatattagaagtcacaaagaaaatttccatagaagggaattatgaaactttttttatttccaacgagcatacggaagtatgtttcatagctaattggatccctagcctcagcacaaaaat

SEQ ID NO: 98 - DNA, 1458 bp, Homo sapiens
ttagtatgcttgaaatataacttgtcccagcacctcattaagtagcttcttagctgctcataattgttacagatggagcattcctaatccaacatctaaaatgctccaaaatccaaaactttttgagctttgacatgatgccacaagtggaaaattccacacctgacctcatgtgacaggtcacggtcagaacacagtcaaaattttgtttcatgcacaaaattactgaagatattgtataaaattacttcaggctatgtgcataaggtgtacaagaaacaaacgaattttgtgtttaggcttgagcctcatccttaagatacctcatgtatatgcaaattttccaaaacccaaaaaatttatgaatctgaaatgcttctcctccaaatgtttcaggtaagggatattcaacttgtatttttattttcctcattcatatacagtgtttttgaatacagtattttgatctgcctttaacaaatgttttctcattatttcagttgccaaagctgtttgatggatgctacttctatttgtggggaaccttcaaacaccatccaaaggacaaccttattaagctcgtcactgcaggtgggggccagatcctcagtagaaagcccaagccagacagtgacgtgactcagaccatcaatacagtcgcataccatgcgagacccgattctgatcagcgcttctgcacacagtatatcatctatgaagatttgtgtaattatcacccagagagggttcggcagggcaaagtctggaaggctccttcgagctggtttatagactgtgtgatgtcctttgagttgcttcctcttgacagctgaatattataccagatgaacatttcaaattgaatttgcacggtttgtgagagcccagtcattgtactgtttttaatgttcacatttttacaaataggtagagtcattcatatttgtctttgaatcaaaaaaaaaaaaaaagtctaatgccagattaggaattcatgttatgtttaccatttagaagctgggattgcttttaaaggtttttctttttaaaattggcatgtttttgatttatcatgtctttctattcagattattgggtatcaaagattaatgaggacaccagaatcttggttaaatagacaagtggtatcattactgtttgagtcttttaatattctccatacctgccaccagtgaaaaaacttgccttttttttttttttttttttagtaaacagaatattatcaaacaatttattttggctttattgaaaaaagagtatttggtctaaatgtgccaccataggtgttaaattctcctatctgcaattgtctttatcctatattgtgttcatttcttttcttaataatttactttgttgtgtgtttctacactttcatccctgttttttatcttgtatatcatcaggaaattgtgatttaatcattaacattggttt

SEQ ID NO: 99 - DNA, 1500 bp, Homo sapiens
tattttgatctgcctttaacaaatgttttctcattatttcagttgccaaagctgtttgatggatgctacttctatttgtggggaaccttcaaacaccatccaaaggacaaccttattaagctcgtcactgcaggtgggggccagatcctcagtagaaagcccaagccagacagtgacgtgactcagaccatcaatacagtcgcataccatgcgagacccgattctgatcagcgcttctgcacacagtatatcatctatgaagatttgtgtaattatcacccagagagggttcggcagggcaaagtctggaaggctccttcgagctggtttatagactgtgtgatgtcctttgagttgcttcctcttgacagctgaatattataccagatgaacatttcaaattgaatttgcacggtttgtgagagcccagtcattgtactgtttttaatgttcacatttttacaaataggtagagtcattcatatttgtctttgaatcaaaaaaaaaaaaaaagtctaatgccagattaggaattcatgttatgtttaccatttagaagctgggattgcttttaaaggtttttctttttaaaattggcatgtttttgatttatcatgtctttctattcagattattgggtatcaaagattaatgaggacaccagaatcttggttaaatagacaagtggtatcattactgtttgagtcttttaatattctccatacctgccaccagtgaaaaaacttgccttttttttttttttttttttagtaaacagaatattatcaaacaatttattttggctttattgaaaaaagagtatttggtctaaatgtgccaccataggtgttaaattctcctatctgcaattgtctttatcctatattgtgttcatttcttttcttaataatttactttgttgtgtgtttctacactttcatccctgttttttatcttgtatatcatcaggaaattgtgatttaatcattaacattggtttttttgtgtgtgtggtaaaaatcaacactaggctcatggtacatatttttattctgtacatttgcttgtaactatcaatttgtaactctgtttatctactacatgtgtatatatacttagagcattttctctaacacattttaatgttagtattttttaaaaggtctgaccagtctagcaaattgtcagtccaacgtcattactttaaattaagaagcagtcttcttctggtaaaccttgttggtatttgtaaaataattttgaaggtcttaatttcttcctttgtaaaaggaaaaggttttttttaaagtttttaggttggcatggaggcagaagttggtgattacttgatttacaacagattttttccagatcatacaaaaggccatacagtaagtatagaagtaggtatggggagggcttactaatatcaaataggcaaggccttagtgagtgggcaggataccacctgagagtggccagatgtggggaggttactct

SEQ ID NO: 100 - DNA, 4528 bp, Homo sapiens
ggcgggaagtgagccagggcttggcgcggcggccgtggttgcggcgcgggaagtttggatcctggttccgtccgctaggagtctgcgtgcgaggattatggctgctgttcctcaaaataatctacaggagcaactagaacgtcactcagccagaacacttaataataaattaagtctttcaaaaccaaaattttcaggtttcacttttaaaaagaaaacatcttcagataacaatgtatctgtaactaatgtgtcagtagcaaaaacacctgtattaagaaataaagatgttaatgttaccgaagacttttccttcagtgaacctctacccaacaccacaaatcagcaaagggtcaaggacttctttaaaaatgctccagcaggacaggaaacacagagaggtggatcaaaatcattattgccagatttcttgcagactccgaaggaagttgtatgcactacccaaaacacaccaactgtaaagaaatcccgggatactgctctcaagaaattagaatttagttcttcaccagattctttaagtaccatcaatgattgggatgatatggatgactttgatacttctgagacttcaaaatcatttgttacaccaccccaaagtcactttgtaagagtaagcactgctcagaaatcaaaaaagggtaagagaaacttttttaaagcacagctttatacaacaaacacagtaaagactgatttgcctccaccctcctctgaaagcgagcaaatagatttgactgaggaacagaaggatgactcagaatggttaagcagcgatgtgatttgcatcgatgatggccccattgctgaagtgcatataaatgaagatgctcaggaaagtgactctctgaaaactcatttggaagatgaaagagataatagcgaaaagaagaagaatttggaagaagctgaattacattcaactgagaaagttccatgtattgaatttgatgatgatgattatgatacggattttgttccaccttctccagaagaaattatttctgcttcttcttcctcttcaaaatgccttagtacgttaaaggaccttgacacctctgacagaaaagaggatgttcttagcacatcaaaagatcttttgtcaaaacctgagaaaatgagtatgcaggagctgaatccagaaaccagcacagactgtgacgctagacagataagtttacagcagcagcttattcatgtgatggagcacatctgtaaattaattgatactattcctgatgataaactgaaacttttggattgtgggaacgaactgcttcagcagcggaacataagaaggaaacttctaacggaagtagattttaataaaagtgatgccagtcttcttggctcattgtggagatacaggcctgattcacttgatggccctatggagggtgattcctgccctacagggaattctatgaaggagttaaatttttcacaccttccctcaaattctgtttctcctggggactgtttactgactaccaccctaggaaagacaggattctctgccaccaggaagaatctttttgaaaggcctttattcaatacccatttacagaagtcctttgtaagtagcaactgggctgaaacaccaagactaggaaaaaaaaatgaaagctcttatttcccaggaaatgttctcacaagcactgctgtgaaagatcagaataaacatactgcttcaataaatgacttagaaagagaaacccaaccttcctatgatattgataattttgacatagatgactttgatgatgatgatgactgggaagacataatgcataatttagcagccagcaaatcttccacagctgcctatcaacccatcaaggaaggtcggccaattaaatcagtatcagaaagactttcctcagccaagacagactgtcttccagtgtcatctactgctcaaaatataaacttctcagagtcaattcagaattatactgacaagtcagcacaaaatttagcatccagaaatctgaaacatgagcgtttccaaagtcttagttttcctcatacaaaggaaatgatgaagatttttcataaaaaatttggcctgcataattttagaactaatcagctagaggcgatcaatgctgcactgcttggtgaagactgttttatcctgatgccgactggaggtggtaagagtttgtgttaccagctccctgcctgtgtttctcctggggtcactgttgtcatttctcccttgagatcacttatcgtagatcaagtccaaaagctgacttccttggatattccagctacatatctgacaggtgataagactgactcagaagctacaaatatttacctccagttatcaaaaaaagacccaatcataaaacttctatatgtcactccagaaaagatctgtgcaagtaacagactcatttctactctggagaatctctatgagaggaagctcttggcacgttttgttattgatgaagcacattgtgtcagtcagtggggacatgattttcgtcaagattacaaaagaatgaatatgcttcgccagaagtttccttctgttccggtgatggctcttacggccacagctaatcccagggtacagaaggacatcctgactcagctgaagattctcagacctcaggtgtttagcatgagctttaacagacataatctgaaatactatgtattaccgaaaaagcctaaaaaggtggcatttgattgcctagaatggatcagaaagcaccacccatatgattcagggataatttactgcctctccaggcgagaatgtgacaccatggctgacacgttacagagagatgggctcgctgctcttgcttaccatgctggcctcagtgattctgccagagatgaagtgcagcagaagtggattaatcaggatggctgtcaggttatctgtgctacaattgcatttggaatggggattgacaaaccggacgtgcgatttgtgattcatgcatctctccctaaatctgtggagggttactaccaagaatctggcagagctggaagagatggggaaatatctcactgcctgcttttctatacctatcatgatgtgaccagactgaaaagacttataatgatggaaaaagatggaaaccatcatacaagagaaactcacttcaataatttgtatagcatggtacattactgtgaaaatataacggaatgcaggagaatacagcttttggcctactttggtgaaaatggatttaatcctgatttttgtaagaaacacccagatgtttcttgtgataattgctgtaaaacaaaggattataaaacaagagatgtgactgacgatgtgaaaagtattgtaagatttgttcaagaacatagttcatcacaaggaatgagaaatataaaacatgtaggtccttctggaagatttactatgaatatgctggtcgacattttcttggggagtaagagtgcaaaaatccagtcaggtatatttggaaaaggatctgcttattcacgacacaatgccgaaagactttttaaaaagctgatacttgacaagattttggatgaagacttatatatcaatgccaatgaccaggcgatcgcttatgtgatgctcggaaataaagcccaaactgtactaaatggcaatttaaaggtagactttatggaaacagaaaattccagcagtgtgaaaaaacaaaaagcgttagtagcaaaagtgtctcagagggaagagatggttaaaaaatgtcttggagaacttacagaagtctgcaaatctctggggaaagtttttggtgtccattacttcaatatttttaataccgtcactctcaagaagcttgcagaatctttatcttctgatcctgaggttttgcttcaaattgatggtgttactgaagacaaactggaaaaatatggtgcggaagtgatttcagtattacagaaatactctgaatggacatcgccagctgaagacagttccccagggataagcctgtccagcagcagaggccccggaagaagtgccgctgaggagctcgacgaggaaatacccgtatcttcccactactttgcaagtaaaaccagaaatgaaaggaagaggaaaaagatgccagcctcccaaaggtctaagaggagaaaaactgcttccagtggttccaaggcaaagggggggtctgccacatgtagaaagatatcttccaaaacgaaatcctccagcatcattggatccagttcagcctcacatacttctcaagcgacatcaggagccaatagcaaattggggattatggctccaccgaagcctataaatagaccgtttcttaagccttcatatgcattctcataacaaccgaatctcaatgtacatagaccctctttcttgtttgtcagcatctgaccatctgtgactataaagctgttattcttgttataccatttgaagtttttactcgtctctattaatatttaaataaatgctggggggtgatagttcttctttttaaaataaacattttcttttgaa

SEQ ID NO: 101 - DNA, 1500 bp, Homo sapiens
agaaattctgatacatgctacaacatagatgctccttgaagacattatgctaagtgaaataagccaatcagaaaagagcaattattgtatgattcaatttatatgcggtacctcgcacttacagacagaaagtgcaatatcggctataaggggttgtgagaaacgggtaacggggagttactgtgtaacaggcagattttctatttgggataatgaaaaagttctggagatggatagtggtgatggtttcacaacaatgtgaatgtacttaatgccagtgaactgtacacttaaaaatggtgaattttatgttagatagattttatcacacacacaaagaggagggagggcgggagggaaggagagagggaaggaagtagagaggggagaagagaggaagaaaggaaagaaagtaagatctggcatcacagggcccacattcccgcgtgtcagcaataggctgaaacagaagcatggtttctcacgtgtccatggaggcatctgagtgtgtgcccactttcccggttcaatgacaatttgcacctgctcgtgtagaggggtacgggtgaaacagagaccagtattattaaggggatggagaggagagaccgccaaaacatcgcagagacacaccgtcggaaccaagagaatggggtgcagacgcctggcttggcctgtgggaactggcaagtctcagctctcaaacgcccgggcttttcaacccgccacagccgggttccagctgcctacttcctttaaagccttcaccgactctaaaacaccaaaaacaaagacccaactagctccggaagcccgagatgtaaccgtagtcatctgaccctcccgtccggactctgattgggctttggagatacgcgtccctcccggcgctgtacggcgaccccgccccagcagcctgagggggcgggaacagatgtccgagtgcgacagtattggtcggcttccccaggaagcagccaatcggaataggcaagcttccggcgggaagtgagccagggcttggcgcggcggccgtggttgcggcgcgggaagtttggatcctggttccgtccgctaggagtctgcgtgcgaggtgagtaccgcgcgcgtaactacgggtcggtccgcattgatctagccctgctctggcggcccggcccggagctggaggccgctcgggttcttccgtttcctgcactggttcgcctcggcccgctgagtcctctagtctggccaacatcctgggaggacagcagatacataaatacgttcccaaatggggaaacagaggcccggggcgggggcgaactctgccaaggtctcccggggcgtcggaggccgagcatgggctaggacctggcatgttgttgcccatatactccagtgcgtaacatgatgccctgcacagagtaatcccagcccagacctctggcactactacctccgtgtccctcctgaggaacaacgaaaacactttgtactttttctgtggccttccat

SEQ ID NO: 102 - DNA, 1093 bp, Homo sapiens
tctgagtgtgtgcccactttcccggttcaatgacaatttgcacctgctcgtgtagaggggtacgggtgaaacagagaccagtattattaaggggatggagaggagagaccgccaaaacatcgcagagacacaccgtcggaaccaagagaatggggtgcagacgcctggcttggcctgtgggaactggcaagtctcagctctcaaacgcccgggcttttcaacccgccacagccgggttccagctgcctacttcctttaaagccttcaccgactctaaaacaccaaaaacaaagacccaactagctccggaagcccgagatgtaaccgtagtcatctgaccctcccgtccggactctgattgggctttggagatacgcgtccctcccggcgctgtacggcgaccccgccccagcagcctgagggggcgggaacagatgtccgagtgcgacagtattggtcggcttccccaggaagcagccaatcggaataggcaagcttccggcgggaagtgagccagggcttggcgcggcggccgtggttgcggcgcgggaagtttggatcctggttccgtccgctaggagtctgcgtgcgaggtgagtaccgcgcgcgtaactacgggtcggtccgcattgatctagccctgctctggcggcccggcccggagctggaggccgctcgggttcttccgtttcctgcactggttcgcctcggcccgctgagtcctctagtctggccaacatcctgggaggacagcagatacataaatacgttcccaaatggggaaacagaggcccggggcgggggcgaactctgccaaggtctcccggggcgtcggaggccgagcatgggctaggacctggcatgttgttgcccatatactccagtgcgtaacatgatgccctgcacagagtaatcccagcccagacctctggcactactacctccgtgtccctcctgaggaacaacgaaaacactttgtactttttctgtggccttccataatcacgagctgggctactcttgtttttgagtgtctactgtgtgccatgttcctggcacccttgatcttacaactgtagctttacgatatccc

SEQ ID NO: 103 - DNA, 1102 bp, Homo sapiens
cttgctggtaaacctttgctctcattggtggtggtgttcctcctttccccagttctgcccttgtgcagaattcagttattcatttgttctttgggctttccgtgtgctttgatcatttcctcccacctcgctcccttccagctttcatttatccttccaggccaggtcccatttttctaaaagccctttcctaataatcccctccctaatgtcttttgtacttattttagcattgtggaggaagagagggggaacctggttattctgttattcaagtgagccttcagttagttgaagattatatatttcaagtgtcactagttgtaaatgtcaaaacagtctattgaccaaaaaaaaaaaaaaaaaaaaaaaaaagtcctattactctgggcacagttggaacaatgcctgtttgaatcaagtccttcctcccctcaaaaaacattgtgattaatgcaaagtacctaactccactgatttctttttccctcactttttaggattatggctgctgttcctcaaaataatctacaggagcaactagaacgtcactcagccagaacacttaataataaattaagtctttcaaaaccaaaattttcgtaagtgttttgactggtttgctgtcacataggcactaacttaccacattgtacacatgagatatcttctctttaaactcccccattgtacagatgaggaaatgaagctgagagattcattgattttcccactttgccaattaatggtagagtatgttttagcagcaccaggtgagattgtgtctcatctttgcatggttcctggcacataatatttgctcaataaagatttgttgagtaaatgaataattgatcttgtaaatttgggcaaataagtgttttttaagttttggggggtttttttgtttgttttgttttgttttgttttttcttttgagacggagtctcgctctgtcgcacaggctggagtgcagtggcgcgatcttggctcactgcaagctccgcctcctgggttcacgccattctcctgcctcagcctcccgagtagctgggactacaggcacctgccaccacgcctggctaatttttttttgtatttt

SEQ ID NO: 104 - DNA, 1701 bp, Homo sapiens
cctgcctcagccttctgactagctagggcttcaggcatacaccactatgcccggctaattttttgtgtttttattagaggtggggtttcaccatgttggccaggctggtctcgaactcctgacctcaagcattccacctgcctcggcctcccaaagtgctgggattacaggcatgagccactgcacccggcctcttccctttttcatttatgctgtcaccccgctctggagatgctattaactaaggactactagcctgagaaataaagtagtgggaatgacctctcaaagccaaataattagcctctgaatgggaaggaccagagaacgaatacaatttaagttacctgataaatttaaaatcgagagagatggattctttgctcagttgggatacaattaatgtaacctgtgtgaattagtttaaaaaattagttttgtagagttggggggtttcttaaaatggatccatctaatctagtttttccattatttttcagaggtttcacttttaaaaagaaaacatcttcagataacaatgtatctgtaactaatgtgtcagtagcaaaaacacctgtattaagaaataaagatgttaatgttaccgaagacttttccttcagtgaacctctacccaacaccacaaatcagcaaagggtcaaggacttctttaaaaatgctccagcaggacaggaaacacagagaggtggatcaaaatcattattgccagatttcttgcagactccgaaggaagttgtatgcactacccaaaacacaccaactgtaaagaaatcccgggatactgctctcaagaaattagaatttagttcttcaccagattctttaagtaccatcaatgattgggatgatatggatgactttgatacttctgagacttcaaaatcatttgttacaccaccccaaagtcactttgtaagagtaagcactgctcagaaatcaaaaaagggtaagagaaacttttttaaagcacagctttatacaacaaacacagtaaagactgatttgcctccaccctcctctgaaagcgagcaaatagatttgactgaggaacagaaggatgactcagaatggttaagcagcgatgtgatttgcatcgatgatggccccattgctgaagtgcatataaatgaagatgctcaggaaagtgactctctgaaaactcatttggaagatgaaagaggtaacaattattttatcttcattttagtatgttcattgtacttttttattcaaagctagccattgggaatagtcatgaatatatagagcttttgtccttaaggttgttagggtctttagtggtgctttttgaataatctgttggccacatttttgaggcaggacgtactgatgaaatggaaggttttagtctgctaatatagtttccaggatagctctgtgattttatacatgaagaaaatacaggagtttccccttgtccacagctttgcattctctgaggtttcagttacccgcagccggctgaggtctgaaaatattgcatcacttctcttgcgctttgggaccattattaagaaaacacaagccctgcaataccgcgacagtcaatctgataactgagaccactactaagtgattaacagcaacccaggtggacagatcaggtcggggcaagattttatcacactatactcaaaacagcttgaaactgaacactta

SEQ ID NO: 105 - DNA, 1160 bp, Homo sapiens
tgatgcctctgtttctgaagggaaaatttgttaaaagatagacagcaacaatttgggttgtgttttcccacatagtccaaaagagagacttaaataactgggaaactttgtgttaaagatgatttgtacaagcagccgtgtttgtgttattatcagacttatctgttgcactttacccttatttaaatatgagtgaaaagttaaaaactagaaacgtcaatagcaaatacgtgtttcgtaattaaccagagacagacatgaaaatccctaagcaaatcttcggcctcagtcgagcattcactggacttaatccacttgactcaatagtaatcatttatgaataaataagccagcattagcatgtaaagggagaggatccatacaaagtggtgtgattgtttgtgacttgccagaagcactcattcttaatcgctcatgccctgttctttctgtctcattagtggttaacaaatctatgtttatcaactgttttactgtagataatagcgaaaagaagaagaatttggaagaagctgaattacattcaactgagaaagttccatgtattgaatttgatgatgatgattatgatacggattttgttccaccttctccagaagaaattatttctgcttcttcttcctcttcaaaatgccttaggtaaactagctaaataattagcattattatttgtttctgggatactttaaattgtttaatttagtttataatatcatttctatataaaagtattttgtgctttctacaattattttacattcaagtgaaagcctcaaaaaaaaaccctgtttatacatttaattggttgcattctaaagatgaagtcccattatgattaattacatgaaacttcaaacaattttaggtagctgatttttttttttttttgagacagtctcgctctgtcacccaggctggagtgaagtggtatgatcttggctcactgcagcctccacctcccgggttcaagtgattcttgtgcctcagcctcccaggtagctggaactacaggtgcacaccaccatgcctggctaattttttgtattttcagtagagacgaggttttgccatgttgcccaggctagtcttgaacccctgagctcaggcaatccgcccgccttggcctcccaaagtgctag

SEQ ID NO: 106 - DNA, 1128 bp, Homo sapiens
tatatgcagacacacaaaaacacatgtacatatatttgcataataagagaagtccagaaaaagtgctttgaaatctcagaaaaaagagacattaataatcacttgctggagaagtaatgctttggctggggctagaagaacaggtgtgatttgggtacgaagagattggaatggcaggttttccaaattgagaggatcagtggcaaaatccccaaaataggcaatgcagggcttatatgaagaatgtaagtggtacagtatgactgaagatttgtgttactgaaaggacataatcggagataatgttgaaaagggctctttctggacaactttgaggaccagctaaagaagttttataattgaggaaatttaaaaaactacttctcttttctgttatatattgtctgatcagtggtagaaaaatattaagggtttcaaaattatacatttattgagtctagcctatagtatgattggcttaacattttttttatttgcagtacgttaaaggaccttgacacctctgacagaaaagaggatgttcttagcacatcaaaagatcttttgtcaaaacctgagaaaatgagtatgcaggagctgaatccagaaaccagcacagactgtgacggtacaagcaatattttagacataccatgtatttcaactacttacttttgaaaacaacgtaacacaaagattgtgttttgaacctgtggctgtatgttataaaatggcagatttgtagtttcttttcttctaatgtcataaccttgtttactggttagccagcatttgcctgaacaactcatgaactcatgctctcacaagggcgttcattccccattttgaaaatgctacttgttagaaatcatctctcatactgagccaagatctgcaactttaattctaggaggtttttaaatttttatttacaaatgagaacttccacaaaatcctgtgtttcagaaacacggaccacagagcgtaatctcatcataatagagtttccctccccctccttgactaaatattattaggtcttttaactctccttgctagaaattgctttcttgacctttcatcctccggttctcccttgtatatactctgagtctaggtctgggtctt

SEQ ID NO: 107 - DNA, 1133 bp, Homo sapiens
cccaggctggagtgcaatggcacgatctcagctcactgcaacctccacctcccaggttcaagcgattctcctgcctcagcctcccgagtagctgggattacagacacgcaccaccatgcccggctaatttttatattattagtaaagacggggtttcaccacattggccaggctggtctcgaactcctgacctcaggtgatctacccttcttggcctcccaaagtgttgggattacaggcgtgagccaccgtgcccagccccactttaaaaaaaaaaaaaaaaaagaaaaagaaatcaagatcttaagacttttttttttttttttagtgacagggtctcactgtgttgcccaggctggtcttgaactcctggacttaagcaatcctcctgccttggcctccccaaagggctgggattacagtcatgagccaccatgcctagccaagacttttttttttttccctcaaagaaaaatattaacaacataattattttatagctagacagataagtttacagcagcagcttattcatgtgatggagcacatctgtaaattaattgatactattcctgatgataaactgaaacttttggattgtgggaacgaactgcttcagcagcggaacataaggtatcttaattttcccccttctggaatatatctgattatatttctaccactctaagtgaaaaatggacagggcaaaatgttcaggctttctggcctggaaatggcataaggatgatcatcatgccactatgtttttgatttgtttacttttcaaaccactcctttaacattcgtattcatgtttttaagattgggaaaaaagcgaatatattttgctacaatttctatttggtatgaaaactacagatttgcttttgtggcctaccagagtaaactacttatatttaatacgttgttctcttttctctcttcagaaggaaacttctaacggaagtagattttaataaaagtgatgccagtcttcttggctcattgtggagatacaggcctgattcacttgatggccctatggagggtgattcctgccctacagggaattctatgaaggagttaaatttttcacaccttccctcaaattctgtttctcctggggactgttt

SEQ ID NO: 108 - DNA, 1662 bp, Homo sapiens
acttttttttttttccctcaaagaaaaatattaacaacataattattttatagctagacagataagtttacagcagcagcttattcatgtgatggagcacatctgtaaattaattgatactattcctgatgataaactgaaacttttggattgtgggaacgaactgcttcagcagcggaacataaggtatcttaattttcccccttctggaatatatctgattatatttctaccactctaagtgaaaaatggacagggcaaaatgttcaggctttctggcctggaaatggcataaggatgatcatcatgccactatgtttttgatttgtttacttttcaaaccactcctttaacattcgtattcatgtttttaagattgggaaaaaagcgaatatattttgctacaatttctatttggtatgaaaactacagatttgcttttgtggcctaccagagtaaactacttatatttaatacgttgttctcttttctctcttcagaaggaaacttctaacggaagtagattttaataaaagtgatgccagtcttcttggctcattgtggagatacaggcctgattcacttgatggccctatggagggtgattcctgccctacagggaattctatgaaggagttaaatttttcacaccttccctcaaattctgtttctcctggggactgtttactgactaccaccctaggaaagacaggattctctgccaccaggaagaatctttttgaaaggcctttattcaatacccatttacagaagtcctttgtaagtagcaactgggctgaaacaccaagactaggaaaaaaaaatgaaagctcttatttcccaggaaatgttctcacaagcactgctgtgaaagatcagaataaacatactgcttcaataaatgacttagaaagagaaacccaaccttcctatgatattgataattttgacatagatgactttgatgatgatgatgactgggaagacataatgcataatttagcagccagcaaatcttccacagctgcctatcaacccatcaaggaaggtcggccaattaaatcagtatcagaaagactttcctcagccaagacagactgtcttccagtgtcatctactgctcaaaatataaacttctcagagtcaattcagaattatactggtaagtttaaaataaattgaatgcttatatgaaaacaaaactgtcccaaaataggaattatataagaaaaaccatagcaaatcatcattgcctgaaaacattgttgctatgcaaatttctactgatgatatgaattacaaatcacaatttcaaaagcaagttgctcttttgtctctatagcagctgtagttttataaaatgtgtaattataacctattgtagtacggctctaaagtcattacaaatgtgatgtgcctttgaattaacattttttagttcctaaaacaaactcatgagggccaagtttttaatgattttgggatgggcaaaagcaaaaatggattcgcatgctaaaaatgtattttagaattctgtactgatgagaatcgattaatacaaagtagagaagcatgttttatgtgttaaaatgttaaaatatagggtagtctataaaggatatgaagtcaggagtgtcttaaatcagtcaaactacttctttg

SEQ ID NO: 109 - DNA, 1192 bp, Homo sapiens
tgtgcaggactggaacttaggagggtgtcagttgggtcttaagagaggtgtaggcatttgctgcacacgggtcatgtttaagatcataggactaggaaagctccaaaaaagaatgtctacagagcccagtcccaaatatctgaaagactccctcccctatttatggggcagatggaggtagtagagccaggaaagggaatttaaaatgagtagaaaaccatgattgtcttggtggtcatggttggaggaagggagaagaggaaggaaagaataaaagtagtggtaggtgctgtagaaaaagtcaaggaaatacttgatttgggactttggcaagtttttggtggctttgagacttgtagggaaggaaagccagtaaagagtttaagaactgtgctgcagggaaacgtgtgccagtgattctgcagggcaagggaaatgctaaagctgtactttcactgtattcatgtactgatttttcttaacgttgattattttcctagacaagtcagcacaaaatttagcatccagaaatctgaaacatgagcgtttccaaagtcttagttttcctcatacaaaggaaatgatgaagatttttcataaaaaatttggcctgcataattttagaactaatcagctagaggcgatcaatgctgcactgcttggtgaagactgttttatcctgatgccgactggtatgtatttttagaagtgaattggcaggaatccattggcagatgttaaatgaaagctctttaatagaaataaaaagaccacctacacagtatttctatcatttagggacctcttaaacctcctgtaccatagtgagaaagcatattactttatatcctttgttctggttgttgacatcatgaagtttatagccctgtaagattttcaactcgaagctcattgtgttgaactgatctagaatttttctttgggaatttttcttttttctagtctaagcagttttggaaatcaaacagaaaaatcgctgtcagagaccatgaccatttctggcagtttatttgcaacaatctggtgttgcatagtggttaaatcatatatgcatatatgcatagtggtccatcagctatggaccaaaggcctggacttaaagaacagctctgctgctcacagcagtgtggccacatgcaaggcactttactccctgggcccattttctcat

SEQ ID NO: 110 - DNA, 1119 bp, Homo sapiens
cctaggccgggcgcagtggcttgtgcctataatcccagcactttgggaggctgaggcaggtggattacctgaggtcaggagttcaagaccagcctggccaatgtctctactaaaaatacaaaaattagcaggatgtggtggtgcatgcctatagtcctagctactggggagggtaaggcatgacaattgcttgaacctgggaggtggagattgtagtgagctcagatggcaccactgcactccagcctgggcaacagaatgagactctgtctcaaagacaaaaacaaaaacaaaaaaaacactttttttttaaagatcatttttacacattatttaaattgcctaaatataatagtttgagtcatttgagtatggcaaattgttggcaccagggacaatatgccttggtgtcctattaatgatatgatttcttttgtaacttttacattcatgctctgaagacagaacctgacagatattttttcattgttctctttcaggaggtggtaagagtttgtgttaccagctccctgcctgtgtttctcctggggtcactgttgtcatttctcccttgagatcacttatcgtagatcaagtccaaaagctgacttccttggatgtaagttataaaaatactaataaaaacacgccttagaaacaattaaatttcagtcctctggataacctttttattaaatagttcgtgatttgtaaaaaataaagcacagcagttaaatttgcagttgaacagaagtctgaaaatttgatacagataacctctagttcaatctgtttttattctacaagaatgtatcttagtaagaacttttaaccaatgctattttttgctgatgtaaatttttttaacgaatagaaaatcatttcttttttcagtactgccaggtcggcatagttctctttcccttatatcttaaagtgcatacacacatgcatgcctgcacacatatatctttttttctcatggctgagtttaaggaagtaaatgaatgcattctacttaactcttcacaatgtagttgggggtggtggctcatgcctgtaatcccagtgacttggaaggcaaaggtgggaggattgcttgaggccaagaattcaaga

SEQ ID NO: 111 - DNA, 1114 bp, Homo sapiens
tgtgttatgcttttttttgttttgttttgttttgttttaagacagtcttgttctgttgcccaggctggagtgcggtggtgcaaccttggctcactgcaacctctgcctcccaagctccagcaattttcctgccttagcctcctgagtagctggaattacaggcacctgccaccacgccaggctaatttttgtattttcagtagagatggggtttctccgtgttggccatgctagtcttgaactcctgaccccaagtgatccacctgcctcagcctcccaaaatgctgaaattacaggcgtgagccaccacgccctgcctgagttatgcttaataagggttttttaaaatgtatgtacttacatacttgttatgttgagatatgtatttcctttgataggtttgatatgtgactaataaaatatttataaaacctaaggacaaatgtaattttgtcaggttaatgtataaaattgaaattgtttactacttttatacttagattccagctacatatctgacaggtgataagactgactcagaagctacaaatatttacctccagttatcaaaaaaagacccaatcataaaacttctatatgtcactccagaaaaggtttgtatttatatcattattttaaaatatattaaagaccactagaatacatatatttttaagattttaacaaaattttgtatacgtagtgcaaagaatttttgtacaactttcatccagaaaccccaaatggtaacattttactataattgctttgtattctctctctgcatatattttcctgacacatttgattgaaaattgcagacatggtatccttttaagccctaagtacttcactgtacatttcctaaaaacaacgtattctctcatataacctcagtacaatgatcaaaattaggagatgtacattgatgcagtactattacttaatctgtaaaccttattctggtttcactagttgtcccaataatgtcctttatagcaaaagaaaatcccagatcatgcatgcattccgttgtgcttctctgtaatcttgtaaacagtttctctctcttaatatctttcgtgattttgaagtttttgaaggccagtcgttt

SEQ ID NO: 112 - DNA, 1099 bp, Homo sapiens
acattctaaaatttgatctgctattttctattacttctgctgttctcttcatagattgaaataagaaccaattttatatggaggtgtttttgtttttgtttttgttttttcgagaccgagtttcggtattgttaccaggctggagtgcagtggcacgatcttggctcactgcaacctccacctcccgagttcaagcgattctcctgcctcagccttcctgagtagctgggattacaggcatgcaccaccacgcccggctaattttgtatttttagtaaaggtggggtttcaccatgttggttaggctggtcacaaactcccgacctcggatgatccacccacctcggcttcccaaagtgctgggattacaggcgtgagccaccgcacccggccttatagaggttttaatacagcttaagttgtgatggaatttgaagaccacagaatcatgaggtgatgtgtttcagtgtttttacatgtctaatgtatttctggcctagatctgtgcaagtaacagactcatttctactctggagaatctctatgagaggaagctcttggcacgttttgttattgatgaagcacattgtgtcagtcaggtaaatactgttttttatatccggaaataccgataaatacatactaccaacaatatatgtatttactgaataaaaacccacactgagtgaacgagtctcctattttactgaagaataaggtagttcttaatacattgagcagtgttggctttttatagaaggaagctccaagtagtctgaaaagcagtatttttttttccaactagtggggacatgattttcgtcaagattacaaaagaatgaatatgcttcgccagaagtttccttctgttccggtgatggctcttacggccacagctaatcccagggtacagaaggacatcctgactcagctgaagattctcagacctcaggtgtaagttgttgcacgtcacgtatttgagaaccctggggcagtgactgccagagctgctacatgttagaatcacctgtggcgctttaacgccaccaccccacccccaccccacccccatgcccaagttgtaacccgatggcagcta

SEQ ID NO: 113 - DNA, 1149 bp, Homo sapiens
ctggtcacaaactcccgacctcggatgatccacccacctcggcttcccaaagtgctgggattacaggcgtgagccaccgcacccggccttatagaggttttaatacagcttaagttgtgatggaatttgaagaccacagaatcatgaggtgatgtgtttcagtgtttttacatgtctaatgtatttctggcctagatctgtgcaagtaacagactcatttctactctggagaatctctatgagaggaagctcttggcacgttttgttattgatgaagcacattgtgtcagtcaggtaaatactgttttttatatccggaaataccgataaatacatactaccaacaatatatgtatttactgaataaaaacccacactgagtgaacgagtctcctattttactgaagaataaggtagttcttaatacattgagcagtgttggctttttatagaaggaagctccaagtagtctgaaaagcagtatttttttttccaactagtggggacatgattttcgtcaagattacaaaagaatgaatatgcttcgccagaagtttccttctgttccggtgatggctcttacggccacagctaatcccagggtacagaaggacatcctgactcagctgaagattctcagacctcaggtgtaagttgttgcacgtcacgtatttgagaaccctggggcagtgactgccagagctgctacatgttagaatcacctgtggcgctttaacgccaccaccccacccccaccccacccccatgcccaagttgtaacccgatggcagctaaatcagaacgtttggggctgagagccagtatttttttaaaaatccccaagtgattacaatgtgcagcagagtttgggaaccagagtcctagggcttttcttcacttactgaaattaaaactccttttcagtacctactttagaagtagggataaattgcatgccatatctatcatccctggtatagtcccagtaataaattaatttttacttatctaattttggcttccatatatcctagagtatacttcttgaaatgaaagatgaccctgctttgtcatttccccctaaggtcccagttgaatccaggatgttgaaaatagtccagatactatgtcgaatagcttttttacttt

SEQ ID NO: 114 - DNA, 1107 bp, Homo sapiens
aggttgtagtgagccaagattgtgccactgcactccagcctgggcgacagagtgagactctgtctcaaaaaaaaacaaaacaaaacaaaacaaaaactacttgatattagcttgggctgctatgacagaatactgtagactgggtggcttaaacaacagaaatttatttctcttggttctgaaagccaggaagtccaagatcaagatgctggcagatcccaagtcagatgaagtccctcttcctggtttgcaagtggtagtattctctttgcatactgacatatgcgggtggggagagccagcaaggtctctacttatttttgagcacttatctcattcataactccacccctcatgacctaattatctcccggaggctccaactcctaataccatcacactgggggttaggattttaggggggacacatgtagtctataacaatacctaaagtcatattttctcataataactaaattttatgtttgggacttttttaggtttagcatgagctttaacagacataatctgaaatactatgtattaccgaaaaagcctaaaaaggtggcatttgattgcctagaatggatcagaaagcaccacccatgtgagtacagccatgtgattagctgtctagaagtaacaaatgtctttttagtaccacaataagatatataaaattgcatattaaacattcctttttgcattatgacagcactaacttgctctttatagagcagactattgcaactctctcaattctggaaattataaaatctcatttggtttaataacaataaattctaacaaaaatatattaaatactccctcctacacacgtatattataacttttggtttcaatgtctttcctcaggcttctatcagtgtttgaattatacagctttttgttttagtgccttgtcccaagcctgtctgcctttgcattatgttaactaaaatgagattctgaaattcatagtagttttccatgtaaccccctttccacttttccatggagaatatttttggtatttctattttattttttagaaattagtatacatatttgtgtggacaaatcagtcagtagagatctaccaagaaa

SEQ ID NO: 115 - DNA, 1161 bp, Homo sapiens
ctcctgggttaaagtgattctcctgcctcagcctcctgactagctgggattacaggtgcccaccaccacacctggctgattttttttgtatttttagtgaagatagcttttcaccatgatgtccaggctggtctcgaactcccgacctcaaatgatctgccctccttggcctcccaaagtgctgggattacaggcatgagccaccgcgcccggccaaggatggcttttttatacccacatgtatctagtgtgaagtagagcccagagttcatccaggtccacctcacgagtcattagcagcgacaggattaaaagccacatctcatttccagcacacatgaattccttgcttgaattattcacgtgtgtggtcttccagcagtataagaacactacgggagatctatttatggttcatatatttctgaaaatgtagtgtaaattgtgtttttgtttatgttaaaaattcttgtttctcagtactcttggtttcttggcagatgattcagggataatttactgcctctccaggcgagaatgtgacaccatggctgacacgttacagagagatgggctcgctgctcttgcttaccatgctggcctcagtgattctgccagagatgaagtgcagcagaagtggattaatcaggatggctgtcaggtaacatttttaaagataaacaaataatagaaataatcttttatagcatataaccaaacatgcacatgtagaatgcaaactgtttttaccttgaaggtagtaaacatcaaaataagactgaaatttaaaaaacagattttctttgagacttctaaagttgctttttctttcataaaaaaaatctgcttgagatataattcacatatcataaaatttatcctttcaaagcaaacaagttagtactttttagtttatttgcaaagttgtacaataatcatctctatctaattccagaatttttgatcaccataaaaagaaacctcatacccagtcacttcccccaccccctaatgcctggaaaccacaaatctactaactactgctaacctgtttctagagtttattactctgtacattgcatgtaaatagaatcatacagtatgtggtctttgtgacttttcttttttttttttttttccggagacagagtctcactctgt

SEQ ID NO: 116 - DNA, 1196 bp, Homo sapiens
gatgataagcagtggagcaggtaagaacgtattgttcctgaaccattggaggaactagcagcagtgacctctgaggagccctgggaacaccctggagctcctgagcaacacgttgcttgtgatcactgacctggatatcatgactgtgtgagcaacaccccccacacctcagtagcaaaaacagagaacagtggcagcacatcgtgggctgactgcagttgattctggctctcttacatgagaatgccaagtcatacaagaaagtgcctgccatgctgagcttctctttaccttcttgggttttaatggcattgcaagttatcagtataaaaactcatattagttatactaaatagttggaccaagttaagatattaggttgttatgtagtgtgcattttaaagtaaaacaaatgatagagcttttagaagcatctattatgaaaatgttccttcaagtctgtgccttatgaatctaataagcttttgcttttatatcaggttatctgtgctacaattgcatttggaatggggattgacaaaccggacgtgcgatttgtgattcatgcatctctccctaaatctgtggagggttactaccaagaatctggcagagctggaagagatggggaaatatctcactgcctgcttttctatacctatcatgatgtgaccagactgaaaagacttataatgagtaagctgggctccattgtagagacattctgtcatcttcagcctcatgatagtagtctactcctgctattgtggtacttctggtccagttttccttaaataatcgtagaaaaatagaggagtttatacagattggcaattttattttagttcatttttattataaaagtggtaagtgcttattttgtaaaactcaaatgatacagatgtgtacaaggcagaaaatttacaaaccatgccttgtagttttgcccccaaaataactctagttattggtttcctttgtatcctttcagaccctatttctgcatgcattcttgcatgtaacacatatttcaaacatgcaggaagataaaaaggagaaaataatgagctgtcatatactaccatctggattaagaaataaaacacaatcaatcgagctgaacccctccccaccaccccatagcctctcttgtctcatccgtcctctcccattagaggcaggcaaatatcttgtat

SEQ ID NO: 117 - DNA, 1191 bp, Homo sapiens
aataatttgggtgatgttcaacagatgttaggcattgctgtgtttcccttcatgtaaaatattctgtctctgtgagttcaccacagcacccccgggcttgttggcacacaattttggaaccactggtgtaactactttgacctcagatactcagagaagtgcatggccactgccgtaatctcaggctctgcttcctcaggatgttcagttcggtggatgctcgactgataaatacagcaaatataagtcaaaccatcatcattggggataatgaagatttgaaaaaaaaaaacctaacatttattcctatagtactaaaatcttgaggatgaacattaatactcagttaattataatatagaatgccatgttgacaatgctgttaacagtaattttcttatttaatatttaaagttatatgaatctattctaaatatttctatgatatgctctatttttcccctataagtatgtcttactatagtcttcatctcttttagtggaaaaagatggaaaccatcatacaagagaaactcacttcaataatttgtatagcatggtacattactgtgaaaatataacggaatgcaggagaatacagcttttggcctactttggtgaaaatggatttaatcctgatttttgtaagaaacacccagatgtttcttgtgataattgctgtaaaacaaaggtaaaaaaagaagttttaaaattctttataattaaattttttttctcttactttaaaaatgtagatacaaattagattgcaaaaggtggtctccgacagattaacaggggaaagacagcttccttccagtagtaatttggaatggaaacatttaaaaagtaatttcatgcggtatcttttctttataattagaaccctgttaaaaaatataatggacatcagcatatccagaatattgagtttatatatgtgcactgatgattacagaatattttagaaatattaatatgcaaacatccaaaaagatccaacatgggcaggtagaatattttaaatttaatatattaatgttattaatataatacattatattaaaaatttaattgattaaattaaatatattaaaattgacgtattaatatttaatattttaaatatttaattaatatactaaaaatctcattctcaaaagagtaataactagtgtaccgtatgtttga

SEQ ID NO: 118 - DNA, 1148 bp, Homo sapiens
aaagtcatctagtaacggggactctaaaaagtgggcaaagtttggggatagctgaaggaaatgagaaaggaaactagcaggagatgatgaaaagagcgttgactatggcaccaaagaccccagaggggttagaatccgtggatttacgtggcaccccacaggttcccacccagtatgtaacagagcactattctaggaggcatggaggatttaaattgtgtgtttgtgtgtgtgtctgtgtgttatatatgtgtttctacccacagagtgctatcaggtagttgaaagacaagacgtatctctgtgaaacagtaacaacatcgagtggtagttgttctagaacttagataagaatgaacatttgaaatttccgtaggttttggtctcggtattggtctggaaatgggttatgatgaatctactatagttaatattaaaccctagtaatctaggcattgttaccttaattatagcagaaagtattctctttttattcataggattataaaacaagagatgtgactgacgatgtgaaaagtattgtaagatttgttcaagaacatagttcatcacaaggaatgagaaatataaaacatgtaggtccttctggaagatttactatgaatatgctggtcgacattttcttgggtaagtcatctgttttgaatgtttgagttacttcaattgaaattgaacatctaaagaatttattacaagtacatagaaaaactttttgtctattttcttataaaacttgagtttctgaataaaacttttaagtaacaaaagaaagtcaattattatactgttttatataatgtatatgtcactaagttgagatggtttcacatacaaagaagaaaataataaagcttatgcgagttcatctgagtgggtggaatgtaactattaaaatgtcagtaaggaaataaaatgaggattagacccataacagcatagagaataggagagagactattatcagattagtgccttaaaaatctctcaggggctgagcacagtggctcacacctgtaatcccagcactttgggaggccgaggcgggcggatcacctgagatcaggagtttgagatcagcctggccaacatggtgaaaccctgtctctactaaaaatacaaaaaattag

SEQ ID NO: 119 - DNA, 1200 bp, Homo sapiens
ggtgtgatggcctgcacctgttatctcagctagtcaggaggctgaggcaggaggatcacttgagcccaggagtttgaggctgcagtgaaccatgattgcaccactgcactccaacctccacaatagagtgagaccctgtctctaaaaaaaaaaaaaaaaatgtagataagtaatgcacagttatcctaatacatagcacagtgataggaagctattatggtttatgtaaactctttctttgatttatttgctccaatataattttgctgctgttttttgtccatgtgtattgtaaaaagataaggaaaagtacatacaaccatagaaattttagcgttctactcaaatactctcatttaacagaaatgagtgtctgtgccggggtttgtgatctattccatctgtccaaacctgtccataaatgactttttagcctcttctatttgagggtgatgatatacgtacatttactcatcttacttcctgtatcttcttatcagggagtaagagtgcaaaaatccagtcaggtatatttggaaaaggatctgcttattcacgacacaatgccgaaagactttttaaaaagctgatacttgacaagattttggatgaagacttatatatcaatgccaatgaccaggcgatcgcttatgtgatgctcggaaataaagcccaaactgtactaaatggcaatttaaaggtatagtatttttcatgtttattttattatctcacaatgagtgaaccaaaatatattattgtgaagtatagtgtctttgtccaagcttatagatactgaatttatatatactgttctatacgaacatattctgtttttcttaaattggaaagagatcttaaaattcaacccaagtaatatgacacctgtcaaaagtaatttaatgggttatcaggtcactaaatctttatatattcattaaagaagcatttatcaagaggctattctatgcttgacactggagatacaaagatggagaatgcacagcccctgttcccagtgggctcactatctgcatgacagaatagaattgccccccaaaaatgcaattaagcattaaataaagcccctgtatgggtacaagtgcacatatacccactcctatgatttgtttctctctcataaaggtagactttatggaaacagaaaattccagcagtgtgaaaaaacaaaaagcgtta

SEQ ID NO: 120 - DNA, 1193 bp, Homo sapiens
gcttatgtgatgctcggaaataaagcccaaactgtactaaatggcaatttaaaggtatagtatttttcatgtttattttattatctcacaatgagtgaaccaaaatatattattgtgaagtatagtgtctttgtccaagcttatagatactgaatttatatatactgttctatacgaacatattctgtttttcttaaattggaaagagatcttaaaattcaacccaagtaatatgacacctgtcaaaagtaatttaatgggttatcaggtcactaaatctttatatattcattaaagaagcatttatcaagaggctattctatgcttgacactggagatacaaagatggagaatgcacagcccctgttcccagtgggctcactatctgcatgacagaatagaattgccccccaaaaatgcaattaagcattaaataaagcccctgtatgggtacaagtgcacatatacccactcctatgatttgtttctctctcataaaggtagactttatggaaacagaaaattccagcagtgtgaaaaaacaaaaagcgttagtagcaaaagtgtctcagagggaagagatggttaaaaaatgtcttggagaacttacagaagtctgcaaatctctggggaaagtttttggtgtccattacttcaatatttttaataccgtcactctcaagaagcttgcaggtgggtacacatgtatcctttgttacgtggcacagattaataggccgaaagttaatcttgctagggaactccttaagtgataaatatatctcagtggtttgtttctttttggggtttgttttgagacggggtctcgctgtgtcacccgggctggagtgctgtggcatgatcatgactcactgcagcctcaacctcctgggctcaagtgatcttcccacctcaatttcccaagtagctgggactacaggtacacaccagcatgcccagctaatttttgtattttttcgtagagacagagtttcaccatgttgcccagtctggtctcgaactcttggcttcaagcaatcctcctgccttagcctgccagagtgctgggattacagataagcatgagccactgagcctggcctcagttgttttaattatttttatttaatctctggattaaaatctcagagaaacaattgaaacttattctttttttgtttgtttttgagacg

SEQ ID NO: 121 - DNA, 1123 bp, Homo sapiens
cacatggggaaagagtggaggaagaaaagtttgtgctggaggaagtaacaatttggttatgccgtctagggtggggtgtacaagtctggagtgcagagaagaggctggagctggaaatagaaatgcagcgttctcagtaaagagagggcacaccagtctcagctagatgagtactggccatgggaacagtgggcaagagcagatctgctccactccacgcacatggcacaggtcccaccctcagcttcctcctgccctggctcttgcccttgctctgccctggcctatgccgctggaattggatggtgggttcctgccctctgtgcctgtctgctgcctctgaggtgctaactttgccttttacaaaattggcctgtgttcccagtaccctgcagttagttggcacttagcagacgtgtgctgaatgcgtgaatgagcctgaattcagtgggttttctatgggtgataatttaaattcctaattttatgcctttgcacagaatctttatcttctgatcctgaggttttgcttcaaattgatggtgttactgaagacaaactggaaaaatatggtgcggaagtgatttcagtattacagaaatactctgaatggacatcgccaggttagtacacagccatgtgtgttctctaaaagcctgtttaatgtgaagcgacgcgtctcactgaattagaaggatgcagttgtgtgaatgcttcctacacctcgtcacactgacatccaagtcagcccccagtggtgtgccagtcacctctgagaggacactagtgcttatgccccctgtgagtgccagttctgaacttactcataggatccaaaaggggacctttgggcccaggggttgctggttcccgtaatgcaagtgctcaagggatcagagccctgggtaccagttccagatctgccaccacgtcatgctgtgtggtctctagcaggccaccaatagcctctttgtgaatcaggttcctccaccaaggaaggaacatgttatctgacaaacatgtctaaagataaaatttaagactagtgtttaaatgttttggagaaatgagcatgcagctagaatgttattattgttagtcattgatagaacctgcctgagtg

SEQ ID NO: 122 - DNA, 1202 bp, Homo sapiens
agtaaaataggatctagaattttcttatgttcatttactaagaaactattgttcaaagatgagatacaggaccgtttgtttcccttatattgagctgattttttcagcacatttaaaataagtaaaattgcctgccatctttatagcagttgatactttttgaattgcctaccagaactaactgcccaatcaacaacaggaacacaggccatatgcgacagtatgagctaaacctcatgtctctagttaacttcaagactatcacaaatttttttaatgaattctgattctcttttgttaaaaatgaattgccattgaacactttggggctttgtgcagtaaaaaaaggtttggttcttgctgaattgttgaatccatatggcagggaagcagctaggtatctgctaaaatgggcccctgcagcgtgtctcttcatatacactaaaaacacgtggaccagtgcgacatcacctgtaaacatctgcattttccatttgtagctgaagacagttccccagggataagcctgtccagcagcagaggccccggaagaagtgccgctgaggagctcgacgaggaaatacccgtatcttcccactactttgcaagtaaaaccagaaatgaaaggaagaggaaaaagatgccagcctcccaaaggtctaagaggagaaaaactgcttccagtggttccaaggcaaaggggtatgttttgtgacatctttttcaatatagggaacaagggaagaaaggacaaaagtgcaacagctctgccttgctttgaaggatttattaaaataagccattattaaatattgctaatggaatgacagttgttaatggagtgacaattaaggtttgatccaaaacaaaaatatttgcttcaagaaacaacaaaaaatatttgcttcagatgtttaaaacatctactgactaatagttatgactaaagttttctttctttttttaatttgaggacaaagtctgactctgttgcccaggctagagtgcagtggcacaatctcggctcactgcaacctctgcctcctgtactcaagtgatcctcccacctcagcctcctgagtagctgggactccaggtgtataccatcactcctggctaatttttgtattttttgtacagatggagtttccccatgttgcccaggctggtctcaaactcctgagctcaagtgatcagcccac

SEQ ID NO: 123 - DNA, 1355 bp, Homo sapiens
ttgccactcctggccacccagctccaccccatgcatgctcaccccacagctgccttgctctggactgtgcaagtccagtcattccggggtgcctgtcagcagggagctggggccttacagcaaggtgtttcacttcttttatttggtcagaatagatgaggacatgtggacctcagctcctcttgcaggctctggttgtaggctgccgaaggtgtgggtggagagaggggcggtgggttggtcacaagtcagaaaattaagaaacagtcctgcacatttcagaaagacaaatccagaacaaatttatatgaagggccgcggtcctttattccataagtagtaaaggaaacttaccttacctagggggctcgtaggcagaaaatgcacaaggacacattaggcccagggaagtggtattgtagctctgtgcaggttgagaggaaggtcattcatttttggtttcatttaacattttgatttttttctttgtcacatttcagggggtctgccacatgtagaaagatatcttccaaaacgaaatcctccagcatcattggatccagttcagcctcacatacttctcaagcgacatcaggagccaatagcaaattggggattatggctccaccgaagcctataaatagaccgtttcttaagccttcatatgcattctcataacaaccgaatctcaatgtacatagaccctctttcttgtttgtcagcatctgaccatctgtgactataaagctgttattcttgttataccatttgaagtttttactcgtctctattaatatttaaataaatgctggggggtgatagttcttctttttaaaataaacattttcttttgaataagcatgttttgctgccgctgcaagtgttgtggccgttgtttctcagaacgtctgaggcagcagctgaatcatctcagtgcaagagcttctgagcataacacgaaacccagaagccaaaggaagagccacgcgtgggcccttgtgaaactaaagcttttcgtgtaagacaacacaaacaaaatttaaagacaaatgacggggaaaagaggagaaaatatattacaaaggattagtatccatcataccaaatacccgtgaaccagtcagaaacatcccagggggcaggtggaccaaggatgtgaacaggctagtctcagaagaagaaatacacatgctcatggcccggcactgtggctcacgcctgggatcccagcactttgggaggccgaggcaggtggatcacgaggtcaggagtttgagaccagcctgcccaacatggtgaaaccccgtctctactaaaaatacaaaaattagccaggcgtggtgtacaggcacgcc

SEQ ID NO: 124 - DNA, 1500 bp, Homo sapiens
ttacctagggggctcgtaggcagaaaatgcacaaggacacattaggcccagggaagtggtattgtagctctgtgcaggttgagaggaaggtcattcatttttggtttcatttaacattttgatttttttctttgtcacatttcagggggtctgccacatgtagaaagatatcttccaaaacgaaatcctccagcatcattggatccagttcagcctcacatacttctcaagcgacatcaggagccaatagcaaattggggattatggctccaccgaagcctataaatagaccgtttcttaagccttcatatgcattctcataacaaccgaatctcaatgtacatagaccctctttcttgtttgtcagcatctgaccatctgtgactataaagctgttattcttgttataccatttgaagtttttactcgtctctattaatatttaaataaatgctggggggtgatagttcttctttttaaaataaacattttcttttgaataagcatgttttgctgccgctgcaagtgttgtggccgttgtttctcagaacgtctgaggcagcagctgaatcatctcagtgcaagagcttctgagcataacacgaaacccagaagccaaaggaagagccacgcgtgggcccttgtgaaactaaagcttttcgtgtaagacaacacaaacaaaatttaaagacaaatgacggggaaaagaggagaaaatatattacaaaggattagtatccatcataccaaatacccgtgaaccagtcagaaacatcccagggggcaggtggaccaaggatgtgaacaggctagtctcagaagaagaaatacacatgctcatggcccggcactgtggctcacgcctgggatcccagcactttgggaggccgaggcaggtggatcacgaggtcaggagtttgagaccagcctgcccaacatggtgaaaccccgtctctactaaaaatacaaaaattagccaggcgtggtgtacaggcacgcctgtagtcccagctactcaggaggctgaggcaagagaatcgcttgaacccaggaggcggaggttgcagtgagccgagatcgtgccactgcactccagcctgggtgacagagcaagactccgtctcaaaaaaaaaaaaaaaaaaagaaatatacatgctctgcaaatatgtgaaaaaggtcaatctccatgaataaaaatatgataaaaccatgtgagaccattcttttgcctacaaattatcaacactggataatatcccagtatttggggtcagcgagaaagattggcagattgtttgggtggacgtgtgtggcagttgctgtagtcctttggtattgtggtggcctcgtttttcaggatgctccataatgggccaattggccccagcatctttggtaggattttggcctctcttgcctgaactccagtggccccattttcggagacatgcgtttctcagctgtaggtcacctttgtctgggtgccacacagcgaggaag

SEQ ID NO: 125 - DNA, 3616 bp, Homo sapiens
gcggccgctgcagagattggaatccgcctgccgggcttggcgaaggagaagggaggaggcaggagcgaggagggaggagggccaagggcgggcaggaaggcttaggctcggcgcgtccgtccgcgcgcggcgaagatcgcacggcccgatcgaggggcgaccgggtcggggccgctgcacgccaagggcgaaggccgattcgggccccacttcgccccggcggctcgccgcgcccacccgctccgcgccgagggctggaggatgcgttccctggggtccggacttatgaaaatatgcatcagtttaatactgtcttggaattcatgagatggaagcataggtcaaagctgtttggagaaaatcagaagtacagttttatctagccacatcttggaggagtcgtaagaaagcagtgggagttgaagtcattgtcaagtgcttgcgatcttttacaagaaaatctcactgaatgatagtcatttaaattggtgaagtagcaagaccaattattaaaggtgacagtacacaggaaacattacaattgaacaatgcctcagctatacatttacatcagattattgggagcctatttgttcatcatttctcgtgttcaaggacagaatctggatagtatgcttcatggcactgggatgaaatcagactccgaccagaaaaagtcagaaaatggagtaaccttagcaccagaggataccttgccttttttaaagtgctattgctcagggcactgtccagatgatgctattaataacacatgcataactaatggacattgctttgccatcatagaagaagatgaccagggagaaaccacattagcttcagggtgtatgaaatatgaaggatctgattttcagtgcaaagattctccaaaagcccagctacgccggacaatagaatgttgtcggaccaatttatgtaaccagtatttgcaacccacactgccccctgttgtcataggtccgttttttgatggcagcattcgatggctggttttgctcatttctatggctgtctgcataattgctatgatcatcttctccagctgcttttgttacaaacattattgcaagagcatctcaagcagacgtcgttacaatcgtgatttggaacaggatgaagcatttattccagttggagaatcactaaaagaccttattgaccagtcacaaagttctggtagtgggtctggactacctttattggttcagcgaactattgccaaacagattcagatggtccggcaagttggtaaaggccgatatggagaagtatggatgggcaaatggcgtggcgaaaaagtggcggtgaaagtattctttaccactgaagaagccagctggtttcgagaaacagaaatctaccaaactgtgctaatgcgccatgaaaacatacttggtttcatagcggcagacattaaaggtacaggttcctggactcagctctatttgattactgattaccatgaaaatggatctctctatgacttcctgaaatgtgctacactggacaccagagccctgcttaaattggcttattcagctgcctgtggtctgtgccacctgcacacagaaatttatggcacccaaggaaagcccgcaattgctcatcgagacctaaagagcaaaaacatcctcatcaagaaaaatgggagttgctgcattgctgacctgggccttgctgttaaattcaacagtgacacaaatgaagttgatgtgcccttgaataccagggtgggcaccaaacgctacatggctcccgaagtgctggacgaaagcctgaacaaaaaccacttccagccctacatcatggctgacatctacagcttcggcctaatcatttgggagatggctcgtcgttgtatcacaggagggatcgtggaagaataccaattgccatattacaacatggtaccgagtgatccgtcatacgaagatatgcgtgaggttgtgtgtgtcaaacgtttgcggccaattgtgtctaatcggtggaacagtgatgaatgtctacgagcagttttgaagctaatgtcagaatgctgggcccacaatccagcctccagactcacagcattgagaattaagaagacgcttgccaagatggttgaatcccaagatgtaaaaatctgatggttaaaccatcggaggagaaactctagactgcaagaactgtttttacccatggcatgggtggaattagagtggaataaggatgttaacttggttctcagactctttcttcactacgtgttcacaggctgctaatattaaacctttcagtactcttattaggatacaagctgggaacttctaaacacttcattctttatatatggacagctttattttaaatgtggtttttgatgcctttttttaagtgggtttttatgaactgcatcaagacttcaatcctgattagtgtctccagtcaagctctgggtactgaattgcctgttcataaaacggtgctttctgtgaaagccttaagaagataaatgagcgcagcagagatggagaaatagactttgccttttacctgagacattcagttcgtttgtattctacctttgtaaaacagcctatagatgatgatgtgtttgggatactgcttattttatgatagtttgtcctgtgtccttagtgatgtgtgtgtgtctccatgcacatgcacgccgggattcctctgctgccatttgaattagaagaaaataatttatatgcatgcacaggaagatattggtggccggtggttttgtgctttaaaaatgcaatatctgaccaagattcgccaatctcatacaagccatttactttgcaagtgagatagcttccccaccagctttattttttaacatgaaagctgatgccaaggccaaaagaagtttaaagcatctgtaaatttggactgttttccttcaaccaccattttttttgtggttattatttttgtcacggaaagcatcctctccaaagttggagcttctattgccatgaaccatgcttacaaagaaagcacttcttattgaagtgaattcctgcatttgatagcaatgtaagtgcctataaccatgttctatattctttattctcagtaacttttaaaagggaagttatttatattttgtgtataatgtgctttatttgcaaatcacccactcctttacaaccatactttatatatgtacatacattcatactgtagaaaccagctcatgtgtacctcatatcccatccttaagagaagaaatgttataaagtagaactaaatataaattttcagaattaatgcattcaaagtaatatatcaaatccaggactttgttaacttcaggtaaaaacttcattagggtaatatcatctcaattttttcaaatgaaaggattctctaattagaaatttatatgtcagagctgttataaatttatcaactgtcaaatatgttctggacagctaaatcatttgagatttttggttttttgatttctattccctaacttgtgaagacaatgaaaaatcaggcagaaatatttagtatctagtcagtatctgtagctacactgtataactgttcttcaataaaatggttcatattttataga

SEQ ID NO: 126 - DNA, 1500 bp, Homo sapiens
tggtgacaattatttgcattttccaaatggacggaatgagcctccggagggtacacgaggtcaccagcgtgagcccgcggtggagctggaggcgtatttatagctggctgacctcagtcctgttgggccctcgccgctccttatcttatgccgctggaattcgcgggctcgcaggtcacaggagcccgggcgcgccgggcctggcgctcccgaatcgatgagggaagccgctctccccggcagatcctcccggccggggagcctccatcaccctgcctgcgcctcggcacgctggcaaggagcccgggaagagacgccgggagcggtgggtgggcgagaaacaaatgcaatgtgacttatatttttctttgtcgcaactaccacgacctggccatcccccaccttggtgacttggtgccttcccagcgaccttatttcacgccagctgactggcgttcaccgcagtgtgagtgtcggccggaggaggggtccacgcgaaagagcccgcgagagtggggatatccggccccgaaggccggagcgggcgtccagggcgccgatggccgcagcgcccggcagccgtgtccacgctcccctccgccgcgttccatcgcgtgctacctacggcgtctgcgggaagctacccgggcggcagctgtggggctggcttgtggggaggggccggcgggcccgcgcggaggagcagccccgactcccgcccgcaccagcagctcggcgcccccttgccggcggctggccctcctccccggcaactgggcgccgggctccgcgaactcttcgggcgcttccgccgtgcgctcggctcttttcgtgtccggggcggggcggggcaggcgcccgtggtcgggtgcgcgcggcgcgggcgggggccttcccagtgcgcgcgcgccgtgcaaggcccgcggacgcccgcccctcccccaggcccccgcacccgcgccgccccctcccctcctggcaagagtcggcggcggtggcggcggccgctgcagagattggaatccgcctgccgggcttggcgaaggagaagggaggaggcaggagcgaggagggaggagggccaagggcgggcaggaaggcttaggctcggcgcgtccgtccgcgcgcggcgaagatcgcacggcccgatcgaggggcgaccgggtcggggccgctgcacgccaagggcgaaggccgattcgggccccacttcgccccggcggctcgccgcgcccacccgctccgcgccgagggctggaggatgcgttccctggggtccgggtgagttgggagtgcgcgtgcggaccggaggggctggccgcagcggggaggccagaggggctcgggcgaggctgcagaggcagctgggcgcgcggtggccggagccaggggctgcccggcccggccccggcagctccgcaggcctcggcgcgcgctgggccgggaccgcccagccagagacccacggcaccccgcgccgcgtcccccgccggcccctct

SEQ ID NO: 127 - DNA, 1281 bp, Homo sapiens
gagcccgcgagagtggggatatccggccccgaaggccggagcgggcgtccagggcgccgatggccgcagcgcccggcagccgtgtccacgctcccctccgccgcgttccatcgcgtgctacctacggcgtctgcgggaagctacccgggcggcagctgtggggctggcttgtggggaggggccggcgggcccgcgcggaggagcagccccgactcccgcccgcaccagcagctcggcgcccccttgccggcggctggccctcctccccggcaactgggcgccgggctccgcgaactcttcgggcgcttccgccgtgcgctcggctcttttcgtgtccggggcggggcggggcaggcgcccgtggtcgggtgcgcgcggcgcgggcgggggccttcccagtgcgcgcgcgccgtgcaaggcccgcggacgcccgcccctcccccaggcccccgcacccgcgccgccccctcccctcctggcaagagtcggcggcggtggcggcggccgctgcagagattggaatccgcctgccgggcttggcgaaggagaagggaggaggcaggagcgaggagggaggagggccaagggcgggcaggaaggcttaggctcggcgcgtccgtccgcgcgcggcgaagatcgcacggcccgatcgaggggcgaccgggtcggggccgctgcacgccaagggcgaaggccgattcgggccccacttcgccccggcggctcgccgcgcccacccgctccgcgccgagggctggaggatgcgttccctggggtccgggtgagttgggagtgcgcgtgcggaccggaggggctggccgcagcggggaggccagaggggctcgggcgaggctgcagaggcagctgggcgcgcggtggccggagccaggggctgcccggcccggccccggcagctccgcaggcctcggcgcgcgctgggccgggaccgcccagccagagacccacggcaccccgcgccgcgtcccccgccggcccctcttttgtctcccactcgcgggttgcaggccgagtttggggatgcggagtgggcgaaagtcgctccggggacgcttctggaatccttaaatgggaaaggcgctcacctccccgccccggagcggcgaggctgatatttgtgatttggctccggacgctgtggggaggaacaggggagaacaaaatgagtttcgggcgggggtcgagtgagaggagcagccggcccgcccccgagtccccgcgggaaggggccctggcccccgagctcccggagctgcttcacct

SEQ ID NO: 128 - DNA, 1115 bp, Homo sapiens
accagtgcaattaattcttcaacctcacaagtcctaatgttctaggtagaagtgtggctgaaattaaaactggttattagactttgtaatacaaaagtagaaaaaagtgatattagctaggtggtccaatatatttttgtctaagtaggaatctgaatattgtagaattgtacatttcggtgctgcttctagctattcctgttcttttttttttttcaaattgagatgagttttttttttttccatcaaagcttaagataacataggaattttatatggaagtactgttcccacagaactaactttacaaatgtaaagcttgggcagaggttgaggaaaatggtaaagtgatagatttcgtaaaaactgtagaaattttcattgactttactttgaaaatgtatagttgtacatgcgaaacgcttctagtattgcttctagatgtattattctgacaaagttccctaagtcttaaataagttctttttttttctaaacagacttatgaaaatatgcatcagtttaatactgtcttggaattcatgagatggaagcataggtcaaagctgtttggagaaaatcagaagtacagttttatctagccacatcttggaggtaaggaaaagaacataatttagaataatatgaaatttctcattttttaatagttgaaaataatccttctacactgcaactttatttgagccttcttcagtttctttgtaacaccacaactttatagtagcttctttagtttccttaatcatcttcctgacgagttcataagtaattctaatatatattcctcataaatgttgaacctcttcaggagtgaaaggtatttatttcttactaatcactttcataaatctccttttagaagataagcattaaatggtttatatgtttatttcttccccctaagtttgcaaagcagagttcagcatgcaagattaggccaggtgtgcctgtaatcccagcactttgggaggctgaggcaggtgggtcacatgaggccaggagttcgagaccagcctggccaacatggcgaaatctcgtctctactaaaaatgcagaaattagctgagcatgatggcctaagcctgtgatcccag

SEQ ID NO: 129 - DNA, 1219 bp, Homo sapiens
tgtctcaaataaaataaaataaaatgaattaatatgtgtaattttctaggtcggcttcctcttctatctatagaataaattatttattagaaagacttagggtgttttcattatatctactagaatttgcaagaatgttgatggttacccttatgttttaaatttaacttttcctgtttaagtcttaatatagttgggaattttcatgttattaataaaataattagaacagccagaaaggactattgagattgtttaatatacttcccttgttgtacatatggctaatctgaggtcaggagaggttgcagcctattaactaaattatttgaagtttgaaattatagtgcctaaaaaaaaaaaagcaaggatacctttaatcttttaaaatgtatttcattgtttaaaggtgtgtttgggcatttgtttcccttttagtttttgaaaaatttccaaaattcagttgtattccttaccttttaaatatttttgtctttcaggagtcgtaagaaagcagtgggagttgaagtcattgtcaagtgcttgcgatcttttacaagaaaatctcactgaatgatagtcatttaaattggtgaagtagcaagaccaattattaaaggtgacagtacacaggaaacattacaattgaacaatgcctcagctatacatttacatcagattattgggagcctatttgttcatcatttctcgtgttcaaggtaaatcagtgttcattttagtaatgtatgtgtgtatataaaaagcactatttcttgcttctgttctttcaactcatccctgtttgaatagttaggcccagcctactagggcagcttttaggaaagaagcaaagatgaaacacgtgccaaataattttttaacttggctgtgatggaaacattttcaagtatttttgaaatctcagtctgagtctgtcttctccttcacaacataggcgtaatgatacacagcattaggtcttgtgaggattaaatgagataaagtatgtaaagccacctcagttagtagctgaaagacagggtaataggtagtccaggctgagcttcaaaattcctctctcctttaaaatacaataaggagcaagtgtaaataataattgaaaaatcattttattggccaggcacagtggctcacacctgtaatcccagcgctttgggaggccgaggtgggcggatcatgaggtcaggagttcaagacc

SEQ ID NO: 130 - DNA, 1163 bp, Homo sapiens
tgactatatacttttacctggcaggggagagaccacggtcacgaaggtggttttcccagggcgaggcttattcattgcactccagatgtgctgacccctgcgatttccccaaatgtgggaaactcaactgcataattgtggtggtgggggactgcgttcatgcttttccctggttaaattaaaaaatttttaagttattttaaaaatataaaaaacaagatttgactgtattctgccttgcgccactcttgtttgtctttcactagtgcaaaaattgtgatatagctgtcttcatgtaccccgcaatacctggtgcagtaattctgtgcataataatgtatgtctgtttgttgtatgaatgaaatttatatttctaaagaaacatgctagctacaattattgtgataagaaagcttaacaactttttctcattgaaaattgtcacgaaacaatgagcttttcagaaatgatttacttacaaattccatatttgaatgcaggacagaatctggatagtatgcttcatggcactgggatgaaatcagactccgaccagaaaaagtcagaaaatggagtaaccttagcaccagaggataccttgccttttttaaagtgctattgctcagggcactgtccagatgatgctattaataacacatgcatgtaagtattttatgcagcccttcttaagagttaggagaatagagttgcatttagtgctattttaagaattattaaacttgtctgcggtttttttttcattcatatatagtatctttccagaaagccaaaaagccttttgttttgtatattagaacattattccattaaatgattgataggtgagttactatattagaattatgttataatgcagcttttaaaataagatcaaagggatctagtatttaacatctgagtttttaatgatcttttaatcttaaatttattgatgctcattttagaaaacttagaggttaccaaaaaagaaatcagaaaactcactgacaacctcctacttctttttaatttaaaaaaaaattttttttttaactatagacaggatcttgctatgttgcccaggctggtctcaaactcctgggctcaagcagtccttccacctcagcctcccaaagtgctgggattactagggtgagctgcca

SEQ ID NO: 131 - DNA, 1103 bp, Homo sapiens
cccatcatattcagtaaaaggtgccttttagtccccttttttttggtcattaagcctatttgtatgtttcagagaaaagtttgtttttatctattatcatatacaatatggaagtactgaaaaaatgggtaaaaagagacaaagttattttaaagtatgttttcaaaacatgacataaaattttataaatcagctttctgtgatcacatgactgattagcaaagagaagtcacataactcctatgtggaggacttgtttaattgaaatccttttcttcttgacaaagggttgtcactggccttttagatcttggctcagacataactttcatttgtcttaaaacctctggcgttgccaataaatcacgtgtgaatgcaattctaagtcacaaaacaaagtattaaaggccatctgtacctgttcacattcagactcaaatttcgttagtactttctatgtgaatttatgttttgttttgttttgtttttttctgttttagaactaatggacattgctttgccatcatagaagaagatgaccagggagaaaccacattagcttcagggtgtatgaaatatgaaggatctgattttcagtgcaaagtaagatataatttgggacccatgagacaaagaagggaggggccatatgaaagcatcgatttcccccaggagaaacatgcctggtgtacacatcgctgtatgttcacatcagtaaatatattggaggaatacctactgtctagattctgtcctgtattcatatgtagaatttataactaaatcatttctgaaaagctaattgtttgattacaatttccttttttatttccatagacagcacctggctctgttgcccaggctggagtgcagtgctgcgatctccgctcactgcaacctcaagccagcctcctgcctcagccttctgaatagctgagactacaggtgcatgccactatacctggctaatttttgtattttttgtagagacaaggttttaccatgttgcccaggctggtctcaaactcctgggctcaagcagtctgcccgcatcggcccgcaaagtgctgggattacaggtgtgagccactgtgcccagcctg

SEQ ID NO: 132 - DNA, 1097 bp, Homo sapiens
agaatgctttctgtagtttgtccttccctcaccatggatgctcaacttgcctctgcatcaggctcatgacttccgacgtggctggggtaggcagggtctgcagcgcctctgcacgctcagctgccttgctaaccagccttttctttggactacgacaccctccactttttagtctgatcttaaatctcatccacatctcagtaccacagtgagattatatgtaccagaccagtttatgattgtaattacctaagttcgggtttggtgttctaatctagtgtctaacacaccatccacatagatatgttcttaagaaaagccattttgcagtcttcactatttcagcacaaattttaatctttcaataatctgtttttacatataaaatttgcaggcccctttcactcactgaaatagaaattgtattttatgaatactaaaaagacatatcagtttaaaataccaaaccatttctaattttatcattactcttcttttaggattctccaaaagcccagctacgccggacaatagaatgttgtcggaccaatttatgtaaccagtatttgcaacccacactgccccctgttgtcataggtaggttagccgagaaaagtcggagcatgcttctcaaatatcttctctggttttacagtaaccaggctacctagaattgaacacgtcagattattttttcatttcaattgtttacattgtttacttttattgtcaggtccgttttttgatggcagcattcgatggctggttttgctcatttctatggctgtctgcataattgctatgatcatcttctccagctgcttttgttacaagtaagaagatatttattttgaagcaaaatattttgtcaaatattagatgtcaaccgctgtttgtaaagccagttgcagaaaccattaacttgtattctctggttgtatatctcctttatgtaactagactatagttctcttaagggaaaaggaccttactaccaattaattaattgggcacaatttcatacttcttgtatgttcatgattacttatgattttcttattaatggaatagtgagctttctggcatctgaatgtttt

SEQ ID NO: 133 - DNA, 1100 bp, Homo sapiens
ttatgattgtaattacctaagttcgggtttggtgttctaatctagtgtctaacacaccatccacatagatatgttcttaagaaaagccattttgcagtcttcactatttcagcacaaattttaatctttcaataatctgtttttacatataaaatttgcaggcccctttcactcactgaaatagaaattgtattttatgaatactaaaaagacatatcagtttaaaataccaaaccatttctaattttatcattactcttcttttaggattctccaaaagcccagctacgccggacaatagaatgttgtcggaccaatttatgtaaccagtatttgcaacccacactgccccctgttgtcataggtaggttagccgagaaaagtcggagcatgcttctcaaatatcttctctggttttacagtaaccaggctacctagaattgaacacgtcagattattttttcatttcaattgtttacattgtttacttttattgtcaggtccgttttttgatggcagcattcgatggctggttttgctcatttctatggctgtctgcataattgctatgatcatcttctccagctgcttttgttacaagtaagaagatatttattttgaagcaaaatattttgtcaaatattagatgtcaaccgctgtttgtaaagccagttgcagaaaccattaacttgtattctctggttgtatatctcctttatgtaactagactatagttctcttaagggaaaaggaccttactaccaattaattaattgggcacaatttcatacttcttgtatgttcatgattacttatgattttcttattaatggaatagtgagctttctggcatctgaatgttttcgatctgtcccaagaaacccactgtgttataattcttttttttttttttgcgttataattctttagaaatttggagctccagaattgtttgcatgtagccatgatttcagaagacagttgccaaaaaagaagagtaataagagacagtccctaatggatataaactttaataataaaacatcataccaacctagatacattaatgaaacaagttagtaaacccataaataaacaaa

SEQ ID NO: 134 - DNA, 1145 bp, Homo sapiens
attctatctcaaaaaataagtatttgttaaaaatatgagtaggcagttcacagaaaaaaaaaagctgaactgtggaaaaaaattcaattttgctagtaaccagaggaaagcatattaaaagaaggcattgtttcatatctatcaagttggcaaaagtctgaaaatatgacttcgaggtttgggttggaatgtaaggaaatgtatattgtgattatttgaagtcgtatttttttatagctaggatgacacttcacatctgattttgatagtgtctttttacatgccaatacactatagacatctttctgttttaacatgatacatagaactctgaactccatttctagatgtatttaacaggatatattatccaatgataagactaatttggataggattctttctgagggaaggataatggtatagagaacctcaaggtttttcttagggttttatagtttttcatttttaatgtagattgttttctgcttttttaaaagacattattgcaagagcatctcaagcagacgtcgttacaatcgtgatttggaacaggatgaagcatttattccagttggagaatcactaaaagaccttattgaccagtcacaaagttctggtagtgggtctggactacctttattggtaagttaaacgttcctatagacatgaatggtgtgttgatttagaatgtgtcctcatgatggtggacagtataattattgcagatcagggaacaataatggacacatttttttctccttatttagaaagaggtatgcagtattgcaaggtgaaattagttaaaaataagaaatatgaaccaagaaaaatagaatagtcaagtaagatagagctataaaccaggttataggaaccaagtcctacagagaaaggcaggggaagttagatcacgaagtcctatatgaaaggcaagagttagctcacaagttttgctctaagcattttaccagccaacttaaagaggaatcaggtataagattccttgcatctgtaagtttaaactgattgattgagggaactgtaactatttcagattctgaaataaaaaagaagtttcaacagatattcttagagaggatgcttctctcaatatactactaccaaaacacatagttcaataa

SEQ ID NO: 135 - DNA, 1193 bp, Homo sapiens
gccagccacttgaataacctgtttatgatttcagaatacattgtacattgtttcatactttaaagtacattatggccgggcatggtggctcacgcctgtaatcccagcattatgggaggccgggggtggggtggatcacctgaggtcaggagttcaagaccagcctggtcaacgtggctaaaccccatctctactaaaaatacaaaaaaattagctgggcatggtggcgggtgtctgtaatcccagctacttgggaggctgaggcaggagaatcacttgaatctaaaaggtgaaggttgcagtgagccgagatcgcgccactgcactccatcctgggtgacagagcgagactccatctcaaaaaaaaaaaagtacattataagtttttaactggagttggttgggtacaccatgctttttgatgagatggactacccctttgccagtcttaatgggtttctttcatcaagagctcaaaccttttacttttttctataaaggttcagcgaactattgccaaacagattcagatggtccggcaagttggtaaaggccgatatggagaagtatggatgggcaaatggcgtggcgaaaaagtggcggtgaaagtattctttaccactgaagaagccagctggtttcgagaaacagaaatctaccaaactgtgctaatgcgccatgaaaacatacttggtgggtacacactgattcagtcaatttcatttttgacaaggctagtgaggtacaggtggaagcctccatatgtgctttgaaaatgtgtgagttcaactatatacatttggctaaaggaaacctagtagaatacacggtttgaataaaacatagtccggaatgccaaccaagatctttctttactaaccagctgaagaaacagcagtgagtttcaaatggaaaataatactagtttattggacttactcccatagtaatgaaaacccagtcttttatagataacttaagcagtgatttagggtaacattaacatatgtgccttttccctttcataagctcaacagcccaacatgcagtttcattgtacgttctgtgtttaatgtgtgtttccccccatctccacatttacacaatagcaaagtaatttaggtgtgagctggtcagtcaggtacataagccgatctggctatcctgagttttcttttcccttcacctcttgt

SEQ ID NO: 136 - DNA, 1298 bp, Homo sapiens
ggagtgcagtggcgccatcttggctcactgcaacctctgccgccaggttcaagtgattctcttgcctcagcctccagagtagccgggaccacaggcacttgccaccatgcccaactaatttttgtatttttagtagagacggggtttcgccctgttggccaggctggtctcgagctcctgacctcaagtgatcctcctgccttggcctcccaaagtgatacaggtgtgagccaccacacccagcatatatgatctttttcttaatcctattcactttcatgattattaagattattataaatttattgtagaagtacagatatatgtgtaaatgtagaaatataatttttagtaacacattcacgacttggtgtcaggcgaattaaagtttcactatctgcacatgatacctaagtttttctcagtatccagaatgagcattacttctccctagcctatctctgatgataactaaccttttaaactcatcaactggacaggtttcatagcggcagacattaaaggtacaggttcctggactcagctctatttgattactgattaccatgaaaatggatctctctatgacttcctgaaatgtgctacactggacaccagagccctgcttaaattggcttattcagctgcctgtggtctgtgccacctgcacacagaaatttatggcacccaaggaaagcccgcaattgctcatcgagacctaaagagcaaaaacatcctcatcaagaaaaatgggagttgctgcattgctgacctgggccttgctgttaaattcaacaggtgagtggttctttgccccactgttttgaaattattttaatttccaaaagatatttccctatttgtattcaagataatggaattctaaaaatgtgcatatgcttgtttttagttacataaatgtatagttgggggggattttgttctttttacaaaaattgtgtcctacttctcctatacataattcttgatatatatatatttttttggtgtttttttttgtttgttttttgttttttgttttttgttttttttaaagacagtgtctcactcagttgcccaggctggaatatagtagtgtgatcttagctcactgcaacctcgacctcatgggctcaagcaatcctcccacctcagcctcctgagtagctgggactacaggcatgcactgccacacctagctaatgtttttattttttgcggagatggggtctcactgtgttgcctaggctggtctcaaactcctaggctcagctgatcctcccaaagtgctgggatta

SEQ ID NO: 137 - DNA, 1176 bp, Homo sapiens
taacttttgtattttatagagacagtgttttaccatgttggccaggctgatcttgaacacctgacctcaggtgatgcgcccgccttggcctcccaaagtgctgagattacaggcatgagcaaccgtgcctggcttaactttatcttatattcagtgttgtcctctttcttagacaccagacttatttagtgacaaaacctgacctgaacggatgtgaggtgtgtattgcccttatccagttgaggaggactatcggacttagtgttttgctgtagacacagtactgagtactgagttggattaagagtgctgccccaaccctgctgaggatgtcatgtagtatgtagcatgtatttaaagaaaaatctgaaaaatgctaaattccacaatgcatctggccccaaggagaaaaagaagcttttataaaataggacaaaaatacaagataaactattttatttttggccctcaacttggaccttggctttcttttgtttcagtgacacaaatgaagttgatgtgcccttgaataccagggtgggcaccaaacgctacatggctcccgaagtgctggacgaaagcctgaacaaaaaccacttccagccctacatcatggctgacatctacagcttcggcctaatcatttgggagatggctcgtcgttgtatcacaggaggtgggagtttgagtagtttctgattatgttgatttactcatcattttaaaaataacagctccagttatataactttttagtttttaatttttgtgggcacatagtaggtgtatatattattggataaggagttattttgatacaggcatgccatgtgtaataatcacatcttggagaattggatatctgtcccttcagacatttatcctttgtttcaccaaccagttatactccttgagttatttttaagtgtacaattaaattattactaactgtagtcctccccgttgtgctataaaataccaaatacttattcattcttctattttgtctctacttattaaacatccccccccatctgctgctacccttcccaacctctggtaaccatccttctgttctccatgagttcagttgttttgatttttagatctcacaagtaagtgagaacatgtgaagtttgtctttctgtgcctggcttattttacttaacgttatga

SEQ ID NO: 138 - DNA, 1131 bp, Homo sapiens
tccatgtagggaactgtttaccatttgtgtacccgggcactggccaaggccaaaccttgcaagccgcctttcctaagggaaggtctcaggcctgctgtgtgaacccttatctgcacctcataagtctttctactgcagagcaaaatgaaacaaaataataaaaactattcattagtaggaacaaccatataagtaaataattatactttagggtaaatggctgatttcgccttgcttattttttttaaggaagattgatatgccctttgtcgatggactctatcacagttgtgatgacatccctggtggaggtagaggaaatagttggacataaataagagaaaaacatacatctactattaagagtgaatcatagtgtctatattttttcttgtgtaagaatccgttttagttccatagtttagcaaaagatgcttactagattggtatatcttgtccagcaaccatttttgtgcccatgttttctcattcccttatagggatcgtggaagaataccaattgccatattacaacatggtaccgagtgatccgtcatacgaagatatgcgtgaggttgtgtgtgtcaaacgtttgcggccaattgtgtctaatcggtggaacagtgatgaagtgagtggaactcagtcccctgaagaagtgattcgtaaatgccaccaaatatattctctgctcactgaacatctctttacttttcagtgtctacgagcagttttgaagctaatgtcagaatgctgggcccacaatccagcctccagactcacagcattgagaattaagaagacgcttgccaagatggttgaatcccaagatgtaaaaatctgatggttaaaccatcggaggagaaactctagactgcaagaactgtttttacccatggcatgggtggaattagagtggaataaggatgttaacttggttctcagactctttcttcactacgtgttcacaggctgctaatattaaacctttcagtactcttattaggatacaagctgggaacttctaaacacttcattctttatatatggacagctttattttaaatgtggtttttgatgcctttttttaagtgggtttttatgaactgcatcaagacttcaatcctgatt

SEQ ID NO: 139 - DNA, 2595 bp, Homo sapiens
ggctgatttcgccttgcttattttttttaaggaagattgatatgccctttgtcgatggactctatcacagttgtgatgacatccctggtggaggtagaggaaatagttggacataaataagagaaaaacatacatctactattaagagtgaatcatagtgtctatattttttcttgtgtaagaatccgttttagttccatagtttagcaaaagatgcttactagattggtatatcttgtccagcaaccatttttgtgcccatgttttctcattcccttatagggatcgtggaagaataccaattgccatattacaacatggtaccgagtgatccgtcatacgaagatatgcgtgaggttgtgtgtgtcaaacgtttgcggccaattgtgtctaatcggtggaacagtgatgaagtgagtggaactcagtcccctgaagaagtgattcgtaaatgccaccaaatatattctctgctcactgaacatctctttacttttcagtgtctacgagcagttttgaagctaatgtcagaatgctgggcccacaatccagcctccagactcacagcattgagaattaagaagacgcttgccaagatggttgaatcccaagatgtaaaaatctgatggttaaaccatcggaggagaaactctagactgcaagaactgtttttacccatggcatgggtggaattagagtggaataaggatgttaacttggttctcagactctttcttcactacgtgttcacaggctgctaatattaaacctttcagtactcttattaggatacaagctgggaacttctaaacacttcattctttatatatggacagctttattttaaatgtggtttttgatgcctttttttaagtgggtttttatgaactgcatcaagacttcaatcctgattagtgtctccagtcaagctctgggtactgaattgcctgttcataaaacggtgctttctgtgaaagccttaagaagataaatgagcgcagcagagatggagaaatagactttgccttttacctgagactttcagttcgtttgtattctacctttgtaaaacagcctatagatgatgatgtgtttgggatactgcttattttatgatagtttgtcctgtgtccttagtgatgtgtgtgtgtctccatgcacatgcacgccgggattcctctgctgccatttgaattagaagaaaataatttatatgcatgcacaggaagatattggtggccggtggttttgtgctttaaaaatgcaatatctgaccaagattcgccaatctcatacaagccatttactttgcaagtgagatagcttccccaccagctttattttttaacatgaaagctgatgccaaggccaaaagaagtttaaagcatctgtaaatttggactgttttccttcaaccaccattttttttgtggttattatttttgtcacggaaagcatcctctccaaagttggagcttctattgccatgaaccatgcttacaaagaaagcacttcttattgaagtgaattcctgcatttgatagcaatgtaagtgcctataaccatgttctatattctttattctcagtaacttttaaaagggaagttatttatattttgtgtataatgtgctttatttgcaaatcacccactcctttacaaccatactttatatatgtacatacattcatactgtagaaaccagctcatgtgtacctcatatcccatccttaagagaagaaatgttataaagtagaactaaatataaattttcagaattaatgcattcaaagtaatatatcaaatccaggactttgttaacttcaggtaaaaacttcattagggtaatatcatctcaattttttcaaatgaaaggattctctaattagaaatttatatgtcagagctgttataaatttatcaactgtcaaatatgttctggacagctaaatcatttgagatttttggttttttgatttctattccctaacttgtgaagacaatgaaaaatcaggcagaaatatttagtatctagtcagtatctgtagctacactgtataactgttcttcaataaaatggttcatattttatagatgccttgttatctcaagaaatctgatttacataaacttatacttctttaatgctttttaaatatttattctgagcaaacaattcatgagtacatcaagtgagatagttttatttgattataacataaaataaatgtgattatatcacatcatcatcaaaaaggtttaaattaaatgggaggaaatcagcatatgtccacccattaccaaaatttgactatcatttaaggttaaaacttacaaatttgtctgcacatcaaatttcacaaatttgaaaattgccttaaccattttgattaataagtttcatctgccataattaaagtctgaagtgttcatcaagataagtaaatttgcatatggataatacccaataacttgttttttcagaatttttcaccatatgtatactgagaaatacaaatattttaatctgcgttgccgtatgatatgattgcacttagaacacccaatttacttaaatcttggtttacttttgac

SEQ ID NO: 140 - DNA, 1500 bp, Homo sapiens
taaaagggaagttatttatattttgtgtataatgtgctttatttgcaaatcacccactcctttacaaccatactttatatatgtacatacattcatactgtagaaaccagctcatgtgtacctcatatcccatccttaagagaagaaatgttataaagtagaactaaatataaattttcagaattaatgcattcaaagtaatatatcaaatccaggactttgttaacttcaggtaaaaacttcattagggtaatatcatctcaattttttcaaatgaaaggattctctaattagaaatttatatgtcagagctgttataaatttatcaactgtcaaatatgttctggacagctaaatcatttgagatttttggttttttgatttctattccctaacttgtgaagacaatgaaaaatcaggcagaaatatttagtatctagtcagtatctgtagctacactgtataactgttcttcaataaaatggttcatattttatagatgccttgttatctcaagaaatctgatttacataaacttatacttctttaatgctttttaaatatttattctgagcaaacaattcatgagtacatcaagtgagatagttttatttgattataacataaaataaatgtgattatatcacatcatcatcaaaaaggtttaaattaaatgggaggaaatcagcatatgtccacccattaccaaaatttgactatcatttaaggttaaaacttacaaatttgtctgcacatcaaatttcacaaatttgaaaattgccttaaccattttgattaataagtttcatctgccataattaaagtctgaagtgttcatcaagataagtaaatttgcatatggataatacccaataacttgttttttcagaatttttcaccatatgtatactgagaaatacaaatattttaatctgcgttgccgtatgatatgattgcacttagaacacccaatttacttaaatcttggtttacttttgacttgataccataatctttaaaatcatttgtcatctttttttttttttttttgagacggagtctcgctctgtcgcccaggctggactgcggactgcagtggcgcaatctcggctcactgcaagctccgcttcccgggttcacgccattctcctgcctcagcctcccgagtagctgggactacaggcgcccgccaccgcgcccggctaattttttgtatttttagtagagacggggtttcaccttgttagccaggatggtctcaatctcctgacctcatgatccacctgcctcggcctcccaaagttcatttgtcatcttaataaaaatataaagacaggcaaagtttattggaaatgttcaaatggtgtgtggaagcaaaaaattacagccagtatatgagaccactattatggttttttaaaattaacttggtctagtaaaagtgatatcaagagttaatcttagaaacttgctcagtaaaaacattttctagtataacat

SEQ ID NO: 141 - DNA, 2949 bp, Homo sapiens
cgcctcccttccccctccccgcccgacagcggccgctcgggccccggctctcggttataagatggcggcgctgagcggtggcggtggtggcggcgcggagccgggccaggctctgttcaacggggacatggagcccgaggccggcgccggcgccggcgccgcggcctcttcggctgcggaccctgccattccggaggaggtgtggaatatcaaacaaatgattaagttgacacaggaacatatagaggccctattggacaaatttggtggggagcataatccaccatcaatatatctggaggcctatgaagaatacaccagcaagctagatgcactccaacaaagagaacaacagttattggaatctctggggaacggaactgatttttctgtttctagctctgcatcaatggataccgttacatcttcttcctcttctagcctttcagtgctaccttcatctctttcagtttttcaaaatcccacagatgtggcacggagcaaccccaagtcaccacaaaaacctatcgttagagtcttcctgcccaacaaacagaggacagtggtacctgcaaggtgtggagttacagtccgagacagtctaaagaaagcactgatgatgagaggtctaatcccagagtgctgtgctgtttacagaattcaggatggagagaagaaaccaattggttgggacactgatatttcctggcttactggagaagaattgcatgtggaagtgttggagaatgttccacttacaacacacaactttgtacgaaaaacgtttttcaccttagcattttgtgacttttgtcgaaagctgcttttccagggtttccgctgtcaaacatgtggttataaatttcaccagcgttgtagtacagaagttccactgatgtgtgttaattatgaccaacttgatttgctgtttgtctccaagttctttgaacaccacccaataccacaggaagaggcgtccttagcagagactgccctaacatctggatcatccccttccgcacccgcctcggactctattgggccccaaattctcaccagtccgtctccttcaaaatccattccaattccacagcccttccgaccagcagatgaagatcatcgaaatcaatttgggcaacgagaccgatcctcatcagctcccaatgtgcatataaacacaatagaacctgtcaatattgatgacttgattagagaccaaggatttcgtggtgatggaggatcaaccacaggtttgtctgctaccccccctgcctcattacctggctcactaactaacgtgaaagccttacagaaatctccaggacctcagcgagaaaggaagtcatcttcatcctcagaagacaggaatcgaatgaaaacacttggtagacgggactcgagtgatgattgggagattcctgatgggcagattacagtgggacaaagaattggatctggatcatttggaacagtctacaagggaaagtggcatggtgatgtggcagtgaaaatgttgaatgtgacagcacctacacctcagcagttacaagccttcaaaaatgaagtaggagtactcaggaaaacacgacatgtgaatatcctactcttcatgggctattccacaaagccacaactggctattgttacccagtggtgtgagggctccagcttgtatcaccatctccatatcattgagaccaaatttgagatgatcaaacttatagatattgcacgacagactgcacagggcatggattacttacacgccaagtcaatcatccacagagacctcaagagtaataatatatttcttcatgaagacctcacagtaaaaataggtgattttggtctagctacagtgaaatctcgatggagtgggtcccatcagtttgaacagttgtctggatccattttgtggatggcaccagaagtcatcagaatgcaagataaaaatccatacagctttcagtcagatgtatatgcatttggaattgttctgtatgaattgatgactggacagttaccttattcaaacatcaacaacagggaccagataatttttatggtgggacgaggatacctgtctccagatctcagtaaggtacggagtaactgtccaaaagccatgaagagattaatggcagagtgcctcaaaaagaaaagagatgagagaccactctttccccaaattctcgcctctattgagctgctggcccgctcattgccaaaaattcaccgcagtgcatcagaaccctccttgaatcgggctggtttccaaacagaggattttagtctatatgcttgtgcttctccaaaaacacccatccaggcagggggatatggtgcgtttcctgtccactgaaacaaatgagtgagagagttcaggagagtagcaacaaaaggaaaataaatgaacatatgtttgcttatatgttaaattgaataaaatactctctttttttttaaggtgaaccaaagaacacttgtgtggttaaagactagatataatttttccccaaactaaaatttatacttaacattggatttttaacatccaagggttaaaatacatagacattgctaaaaattggcagagcctcttctagaggctttactttctgttccgggtttgtatcattcacttggttattttaagtagtaaacttcagtttctcatgcaacttttgttgccagctatcacatgtccactagggactccagaagaagaccctacctatgcctgtgtttgcaggtgagaagttggcagtcggttagcctgggttagataaggcaaactgaacagatctaatttaggaagtcagtagaatttaataattctattattattcttaataatttttctataactatttctttttataacaatttggaaaatgtggatgtcttttatttccttgaagcaataaactaagtttctttttataaaaa

SEQ ID NO: 142 - DNA, 1500 bp, Homo sapiens
gtaattgggcttctcaaagataattgacctcttctctcccaattgttttcatgcgtattttgcagagaatgcttggaatattctgttcatgaaaggcacaaagtacataaaatattttgagtgattttcttcaaaataaaaatgattagttttgatgcttcagatgtctagaatgctatgtgccttgtacaggccctacggcatggaaagtgctcaactgatatttgttaaatgaatgaatctggaaaacgaaaaatacacgaaatattttattcctcaacaatgaagaaaaagctttcagacttccatttagactcgttttaactggctgaattcttcaatgaaaagaaaacacgcgtcgcactgctaatttagctgttcctaaatatatttccatcaaattctgcttggctgtttcaaccttggggttgaagttcttattttgatgacacagagacgttcattgcagtggaaatagcaagtagtattggcttccccgccttcctccctctaggatttcaacttctcctcctcgaacaccagccctgctcttctagtaaatcccacattacagaacaggctgaggacggaggagacaagaggaaagtaggaaaccggagccatggaaacggcggagcggaggcaaagtgtgagagcgcgggtggttagaagggaaaaaaccctccccggacgacggcgcgaaggcgcgcctcagattacgtcacgcaccggggtgacgtcacgaccgtgacacgcgggtgacgccgttgccgcggcgacttctcgtcgtctccgcccccttcccccgctcccccccgcacccccgcctagcgtccttcccccaatcccctcaggctcggctgcgcccggggccgcgggccggtacctgaggtggcccaggcgccctccgcccgcggcgccgcccgggccgctcctccccgcgccccccgcgccccccgctcctccgcctccgcctccgcctccgcctcccccagctctccgcctcccttccccctccccgcccgacagcggccgctcgggccccggctctcggttataagatggcggcgctgagcggtggcggtggtggcggcgcggagccgggccaggctctgttcaacggggacatggagcccgaggccggcgccggcgccggcgccgcggcctcttcggctgcggaccctgccattccggaggaggtgagtgctggcgccaccctgccgccctcccgactccgggctcggcggctggctggtgtttattttggaaagaggcggcggtgggggcttgatgccctcagccaccttctcgggccagctccgcgggctgggaggtgggcatcgcccccgtgtccctctccgtcatgcagcgccttcctacgtaaacacacacaatggcccggggggtttccctggcccccaccccagatgtggggattggggcagcggtggttgagcgggaggctatcaatagggggcgaaactcagggttggtccgaga

SEQ ID NO: 143 - DNA, 1199 bp, Homo sapiens
cttcctccctctaggatttcaacttctcctcctcgaacaccagccctgctcttctagtaaatcccacattacagaacaggctgaggacggaggagacaagaggaaagtaggaaaccggagccatggaaacggcggagcggaggcaaagtgtgagagcgcgggtggttagaagggaaaaaaccctccccggacgacggcgcgaaggcgcgcctcagattacgtcacgcaccggggtgacgtcacgaccgtgacacgcgggtgacgccgttgccgcggcgacttctcgtcgtctccgcccccttcccccgctcccccccgcacccccgcctagcgtccttcccccaatcccctcaggctcggctgcgcccggggccgcgggccggtacctgaggtggcccaggcgccctccgcccgcggcgccgcccgggccgctcctccccgcgccccccgcgccccccgctcctccgcctccgcctccgcctccgcctcccccagctctccgcctcccttccccctccccgcccgacagcggccgctcgggccccggctctcggttataagatggcggcgctgagcggtggcggtggtggcggcgcggagccgggccaggctctgttcaacggggacatggagcccgaggccggcgccggcgccggcgccgcggcctcttcggctgcggaccctgccattccggaggaggtgagtgctggcgccaccctgccgccctcccgactccgggctcggcggctggctggtgtttattttggaaagaggcggcggtgggggcttgatgccctcagccaccttctcgggccagctccgcgggctgggaggtgggcatcgcccccgtgtccctctccgtcatgcagcgccttcctacgtaaacacacacaatggcccggggggtttccctggcccccaccccagatgtggggattggggcagcggtggttgagcgggaggctatcaatagggggcgaaactcagggttggtccgagaaggtcacgattggctgaagtatccagctctgcatctctgtggggtgggggcggcggcggcctcgacgtggaggatataggttagttgctggggctgagacaacagcccgagttactgtcgcgtgtaattcttacatggtcgtggggatgatggggctcatcatttcctctctcctctcccggactgccccccttctcag

SEQ ID NO: 144 - DNA, 1102 bp, Homo sapiens
tataaccattagggagtaaaatatatgcatattgacgtggagagacttctgagacattactccatgaaaaaagcaagtgttaaaagtattttatatatagtatttaattatatgtgtacatttcatatatgtatgtcttaatgttttttccatgagtaaaagggagacatggaaggctgctcaccaaaccataaacagaacttaacctttttgaaagggggcctgggaatgtgaggaagatgaagagagatttcatggtttattctgaatattcatgtattctttgaatcttttatagttgagaatacgttgtattactagtgtagaaaaaaatttaaagatgtttcataataaaagagaaaaaccactgtactaaatgatctctaagctcaaaatttgaggaacactggcagttactgtgatgtagttgtctatgttaaaatatttctaattcatatactaagtgatttttatttaaattcttttgaaatattttttaggtgtggaatatcaaacaaatgattaagttgacacaggaacatatagaggccctattggacaaatttggtggggagcataatccaccatcaatatatctggaggtaagcttttgagtatcatatctagtaattttgaaaagaaaaaaaatgaacttataaaaacatttgtactgataatcttgattattttaggaggtgggattaggaatagatttgggaagagagaattagctttgcctgtattatacttcttaatcttgttttgtgtcacttgttaaaataaacatgtattttataatttagaaaacatcagaactaagggggaagtgatataaatttcaaggtattactctgaattaaatttttatttttatttttattttatttatttatttttttttgagacggagtctcgctctgtcgcccaggctggagtgcagtgacacaatctcagctcactacaacctccgcctcccagcttcagacgattgtcctgcctcagcctcctgagcagctgggactacaggcgcacattaccacgtccacctaattttttctatttttagtagagatggggtttcaccatattggccaggctggtc

SEQ ID NO: 145 - DNA, 1264 bp, Homo sapiens
taaattttggggtttttttggacaaatccttaatacctcatgtccttttcaacttctttttctgttgagagagagagagaacgaatggaattcatatgcctacaacttttccgggacaaaataattcttttaatgggaggaacacttttccttgatacagtgttttatcttacgttagacatgatttggaaggtaaatataagtggaccagaaaattggaaatactgtgcttttttattattcatggaccatctagatatcacatatgtataggtcaaatttatcaggtgtaatatagtgtagtgtctaataacaaagaatttatcaatttaaaggtgaaagtattcatttatagtatttctggcacttattttgtaatttgaaacttaaaaccctatcaactggtgaaaagattataatcaaaggctaaaattttatattctcttttgttaatgtcaggacaaagtccggattgaatataagtctgctttattttataggcctatgaagaatacaccagcaagctagatgcactccaacaaagagaacaacagttattggaatctctggggaacggaactgatttttctgtttctagctctgcatcaatggataccgttacatcttcttcctcttctagcctttcagtgctaccttcatctctttcagtttttcaaaatcccacagatgtggcacggagcaaccccaagtcaccacaaaaacctatcgttagagtcttcctgcccaacaaacagaggacagtggtgagtcagttttaatatcaccattttgctgtttctttgtatttttcagacagatcagttgttgaaaattaatatattattacttcatactcagaggtcatgcaaatagaggcatccatgtcatacaggaatgaaaaatatgtaattatttggtggcaaagtctatattccttaactgaaataaatggtattgtctctagtgttggatttgacatttaaacctgtctgccaaacttgaaccacagtcatgtctaagcactagtttaaaataaatcaggattttaagacttgagcttgttcattatctaatgtgtgtcaggtaagactcattcttcacccttgagaaatctcctttctgagttatattatcagatgttgaacgttcagtgtgattgatatgtttcccctcatctacttcatttttggttgttgaatattagtattaaccattggaacagcgtaccctgtaagtaacatttgaagcatttaaagagaaatct

SEQ ID NO: 146 - DNA, 1104 bp, Homo sapiens
aaacaggggcaccaaacaacaaatatcaagtatacatgttaagacaggtttttttcttcccgctatgtttagggccagtaagaggtctcttaaggacagtcagtgtgattgaagggttatacagttttcagctttgaacagtattggatcaaaattgattttgcttttaatattgacatctattattgctcagtgatggatatactgcgttggtgggtatattgtagcagatactgttacttcttctttttatatgtttaaagtatttcataattttaataaaatagaaaattaactttgctttgatttaagttggtgaataataacaaatatttgggttataatttccctttagtattaagttagctgtagaaatggtgttgtatctgacctagtaacccatttgactttttaaagatgaattactaaatttttttaatgatatgaaaaaatgtaatttgctccctttacctcttatcaatatatttatgataccataggtacctgcaaggtgtggagttacagtccgagacagtctaaagaaagcactgatgatgagaggtctaatcccagagtgctgtgctgtttacagaattcaggatgggtatggtttgtatgtgacgtgaaattttgtttaaaaagaaaatcacacattaaactttgaagttttcttaggatctttaccaaaacctagggaattgaaagtgtactttaggaaaaagtattaaaataatactaagttagcctgaagaaatactgtaggccatatgaggagttaaataattgtatatgactgtagggtttgttactttgatcaaatgattttatttggaatttgagattcttacaatttttgaaccattcagagtgtgatttatttggataatagactcttacccccctcccatttttaatacaaactcatagtttcacaaaaggtatatcaaaattaacattttatattgacctacttttctttcagaaagtgtctaacattgttccaagaccctcacattttgaatcctctttaaaaaaaaaaaaattattttgggggcatgttgtccctgtcccttgagtactctttttccttgaatggatagataa

SEQ ID NO: 147 - DNA, 1103 bp, Homo sapiens
aaaaggtatatcaaaattaacattttatattgacctacttttctttcagaaagtgtctaacattgttccaagaccctcacattttgaatcctctttaaaaaaaaaaaaattattttgggggcatgttgtccctgtcccttgagtactctttttccttgaatggatagataagtccgtacctgtgattttttttttttttttttttttttttggaccccaggaacaatccattttctgctgttgtaggtcttttctggagctgacttgaagaaaagagtacatctctttaccctgctgtttgtccaagagtgatacatttatttggggtaaacttaaaattaatttattgccatttaaatttctaacgatggaatattagggagccaaacctccctcactgttactagcccctcgataaccaattttcatatcttcagcatgaggtatatgaatatttttaggtgtaataaccaagaaaggcttgtgtctacatttttcagagagaagaaaccaattggttgggacactgatatttcctggcttactggagaagaattgcatgtggaagtgttggagaatgttccacttacaacacacaactttgtatgtatctttacatttttttttgaaatgtcaaaaatgtttagattttaatgaatgaatttttatttagggaatgtgaaatatggatgagtaattttggaactgacattttacctgagttgaaatcagttgttttctttaaaaacttgtatttaaacaagagtttaattttaatctttatactttctttttaatttaaaaaagtaaaatgtatgcattgttaaaagataattttgaatagtgcagaagtatgtcaagtaaaaaaagtgaaaataccctcctagaggccaacatttgtttagattaacagattattgttctgtcttccaaacttttttctgtgtacacaaacgtgtgcttgtacctgtaagcctaaagttttttcctttctttttttctctctttccttcattactttcttttcttttccctttcttaaatcaaagtagagccatgctatgtgatattctttgccttatttttttttaattcaacaggat

SEQ ID NO: 148 - DNA, 1149 bp, Homo sapiens
tagctcatttatagttcttcctctccctcctctcccccaatatttttattagtagttttttggttcttctattgggtgcctttgtaactttaatatatgcctttcttgttccgtcaacaccagtcggcatttcttaacctcccttctttgtatgataattaaagtataggcttcttcctttcacctctgtttcctcctccttttcatgtctacttttacttttatgttgtcaagcttgaaatcagttgccagccttttactcatttctcattttttaacttctgggtttttaagttagatagtggggtgggaaataaatatgtgtagtccatctattatcttgaacccccggttttcattttataatagtactttagtatgtgagtttcatgatataaatatattacaactttgttattttaaacaagagagtagatacgtcagtttctagaaagttttcttgtgagtttttgaaatctctgtgattttttactttgcaggtacgaaaaacgtttttcaccttagcattttgtgacttttgtcgaaagctgcttttccagggtttccgctgtcaaacatgtggttataaatttcaccagcgttgtagtacagaagttccactgatgtgtgttaattatgaccaacttgagtaagtaatccaaaaatatctcttttctacctaccattttacacttaaattttcttaatgtgaagctacgatgtctaaaagtctgtgagggtttttcttccatacgattgttatagagaattttttttaagtgtagttagagaataatatgtggaatggacagtatttctctcccaaattgtaatgctggttcagctatacagttaatttatattttatattatcgtttaattaatcaagacccctaacccatagaaaccatttttggatagtttctaggaggagagggagagttgtttcaattaaattaagcattatgattttgtaccacagatcaggtagtctgattctgttagctattttgtaaattacgtttatattcttcctctctctccttcatccccattcagctcccttcccccaatttatttgagtaagatgtaaaatttttgtatccagtatatatctctttctaaaatttctctttgctgtatgccagt

SEQ ID NO: 149 - DNA, 1120 bp, Homo sapiens
tgagtaagatgtaaaatttttgtatccagtatatatctctttctaaaatttctctttgctgtatgccagtttttctaatagattagactgagtctattatctctttttgtgtcattggtgctgctgctgttaaagtcttacttttcttgatcacctgagcaaataaaacttaactctgtactttaagtaaattataatgtcacctaatttacagtagatactttttattctcattctttaaccataaagcatgattttcatcttgtagtatgtagaaatttgctgaactgaatgattagttttaagttataagcatgcctttgaaagtgcaatacaattttttttaaaataagcctttagacaaaaatacaactaattgaattttaacagttgtttctgagaatggaatttgatctcagtttttttggttaactatgtattttggtatatgaagcttctgggttttgcacaagttaggtttgttttgttttgcctcacagtttgctgtttgtctccaagttctttgaacaccacccaataccacaggaagaggcgtccttagcagagactgccctaacatctggatcatccccttccgcacccgcctcggactctattgggtatggtttgacttctgctcttgggcgacatgctacttgaaccgctttcttttggatctcctggttaattagaaacctttccaatgtttaaattgttaaattaaggactttttccccaaataacttatcataccactcagatatttacatgcatttgatacaaataaatgggattaaagctgacatagactatttcagaatcagtcctgaaaaaatcaatattgggtatgatttgacttctgctcttcagtgacatgcttcttgaactgctttcttttggatctcctggttaattagaaacatttccaacatttaaatgcttaaattaaggatcttttccccaaataacttattttatcacaccagtcagatatttacttgcatttggtacaaataagtgggattaaagctgacatagactatttcagaaccagtcctgaaaaaatcatgcaacagatcattttgagtctacaccttgagttcatcttttattaggtata

SEQ ID NO: 150 - DNA, 1160 bp, Homo sapiens
gattttcattcaactcctgtaaaggaacaagtacatcattcaggtcctgaaatatgcatttgtattctcaaaatatttataatttcttaatatgtaaaattttcattttagtaaattcagatgtcaagacaatgttagaaaaaaatggcaaattatattcagtcattctcagagcatttttatataacttcaaaggttgaacttcttcagttgatggccacaggtaatttctagccataagtaaatttccctagtgttttccaggtaagaatcagtggtcttatcattgatagttcctggagggcctacttgagcaaagcagctttggcagtattggatttttaaattaatacttttaaaagtcattactgctaggtttttaatgctttaatgattttgagaatataaaaacaagaaaatccttttatcttcctttttaaatattattacctttatatcgttactctgaatcttatcttccaatgacttcatttttccaggccccaaattctcaccagtccgtctccttcaaaatccattccaattccacagcccttccgaccagcagatgaagatcatcgaaatcaatttgggcaacgagaccgatcctcatcagctcccaatgtgcatataaacacaatagaacctgtcaatattgatgtaagtatccagcattgctagaactaaaaaaaaaccaagtatgtatctttatttttctgctataattataacttagatcagaaataagtgccatttttcatttatcacagttattttaagtgataagcttcttgtgaatcacaaatcagaaaagcttctggtttctctctgatgacattaaatatttcactgactccaggttatacagtcactctgatttttttcccttatgataccatctctataaaagtcatcttcaaatgaaaatggtttaaatatcaaaggactgatagaagcccttgacagaattaagttctttaaaacttttataaaaatgattatgattgtgctataagaggtggatatgaaattaagaatttcaggccaggcatagtggctcatgcctgtaatcccaacactttgggaggccaagatgggtggaacgcttgacccagaagttagagaccagcctaggcaacatagtgagaccccatctctac

SEQ ID NO: 151 - DNA, 1037 bp, Homo sapiens
cacagcggtttgccacacagattatcccattacctcggtatgaagcacagcatccattagttattctttctgttgctcttcctccttttaccatccaccctccaacaggccccagtatgtgttgtttcccccatgtgtccacttgttcttatcattcagctcccacttataagtgagaaaacacagtatttggttttctgctcctgcattagattgttgaggataatggaagccattggttttgaatggcctgaaatggacatcaacatttgattaggactaataattgtttcattataggtttacattggcaagtgcttcaaaatttagattgtattatgttcactagataattccaaattgttttgtgtaatagttataagatgtattgttttaattaataaaataattcttttaacgttagtggaaaattcagtgttatcgctactctctgattatatgcttgcttggaataaatatacattactatttatttgtaggacttgattagagaccaaggatttcgtggtgatggaggtaagtagtgatttcaggtttttttaaaaactcaaggaaactgcaattgctttgctgcttatttcctttatacttgcctctttcaagtaacagacacagagaaaaatgtgtagagaaacccaaaatttttttgtttttctgtagtgtttgtcatttacctctaataaaatgttaactagtttataacatgagtagaaaagatgactggacataaaaggaagtcttttttttttttttttttttttttgagacggagtctcgctctgtcgcccaggttggagtgcagtggcgcgatctcggctcactgcaagctccgcctcccgggttcacgccattctcctgcctcagcctcccgagtagctgggactacaggcgcctgctaccacgcccggctaattttttgtatttttagtagagacggggtttcaccgtgttagccaggatggtctcgatctcctgacctcgtgatccgcccgcctcggcctcccaaagtgctggga

SEQ ID NO: 152 - DNA, 1137 bp, Homo sapiens
aataagtcagatattttcaacattatggccattattagaaaatgtttccatctggggatttccttttttttaatattgattggctgttgaggtaatattaaataattaattaaaaatgtatttgttatataggcttttacatttattttgctttttgatttttttcatcaaagaaacagaaacttgggagtatttttagtatttctgtcttgttttagagagattgtttttctcctagattttgcaccagtaaataaagtatgtgtctatgtctatcatcagatatcttaaaggtcattaaattggccagaaaactaaaagaaattatagttgtaatcaccaaatgaggcccctttttggcccatcctttccaaaaggtctatatttaaacatgcactacattttaaaattaagtctaaatatcccccaaccttctacccctgataaattaacatacttgctcctccttaatgtatacatttttcttttcactaatttaggatcaaccacaggtttgtctgctaccccccctgcctcattacctggctcactaactaacgtgaaagccttacagaaatctccaggacctcagcgagaaaggaagtcatcttcatcctcagaagacaggaatcgaatggtaagagtatatgatatctttttttctctgaattctttcttcttagaagtcacagccaaatgtaatattatcctttagatatattatgtccatatgtgacacagaattcccataattaaataaatttaagaactgatagttttttgcttaaagcatatttctacggcactgctttttgctgtcatctataatataatttagtaaaaggcagttttggaagagtaacagtattctgttctaaagtaaggaaaaagagagaaagctaatattagaaggcacgaaaaggctggtccagaattcagatatttcagatatctactgaaggacattcttccctatttaaaaaatcaactttcttctgcaaaatgaatccaccatggcacatgtatacgtatgtaacaaacctgcacattctgcacatgtatcccagaacttaaagtaaaatttaaaaataaaaaacgaatactgtttagccgtagtattgctactaattgttgaat

SEQ ID NO: 153 - DNA, 1118 bp, Homo sapiens
tctgagcaaagtatcacaaggacagaaaaccaaacaccacatgttctcactcataggtgggaattgaacagtgagaacacttggacacagggcagggaacatcacacactgggacctgtcatggggtagggggaggggagagggacagcattaagagaaatacctaatgtaaatgacaagttaatgggtgcagcacaccaacatggcacatgtatacataagtaacaaacctgcaagttgtgcacatgtaccctagaacttaaagtataataaaataaaaaataaaaataaattttttccatcctaatattgacttcagtcttaaatttaagttttgtattttaagagtcatacttttaactactattcttccagagaatttttcttaaggggatctcttcctgtatccctctcaggcataaggtaatgtacttagggtgaaacataaggttttctttttctgtttggcttgacttgacttttttactgtttttatcaagaaaacacttggtagacgggactcgagtgatgattgggagattcctgatgggcagattacagtgggacaaagaattggatctggatcatttggaacagtctacaagggaaagtggcatggtaagtatgtaatgtggtgacattgtgacaagtcataataggatatgtttaacaacttttattttgtaaaaaatatcatcaaaggaaatattcactgttcgcatcaataaactattttgattagtttcaggactcctccaaaagtttctaacaaaaattatgggaaataaaaactgttcacagcagtcgggactcctaccattttattacagtaataatttttaaaggggaattcctccaggttaactagtcctcaaaaggattttattttcttttagagtctttcagctgataattttatttgtattataagtcacaagtaaacatattaaaaatgtacttaatggctgggcgcagtggcttatgcctgtaatcccagcactttgggaagctgaggctggctgatcacgaggtcaggagatcaagaccatactggccaacatggtgaaaccccatctctactaaaaatacaaaaattagctgggtgtggaagcacgtgc

SEQ ID NO: 154 - DNA, 1085 bp, Homo sapiens
cagttttagtcattttcctaattgaaagtatcataagtaatccataaatttgaaaaaaatgttaactactctgataaaaaagttttatagtttcctacttttaagcaaaattccatagggcctggtaattgtagtttcaacattacttgcagtttcagttagtaaataaatattaagcctagtaagtataatttaatattgtcaaataatttggaaaataccatgggtacttaattgattttaccaaatttccatggaacaaacaaggttggctattttttggattgatattttgaaatactagtacaggaatatcattgttagttgaatttttagccttagaaaacaaatggagtttagatagctaaagtataatttatttgtgatttaataatggtatggagttagggctatgataattagtgaaaacacccaagaatgttttatacttttaaattttaaaaattgaaatgacacttggagtaacaattgccttttaggtgatgtggcagtgaaaatgttgaatgtgacagcacctacacctcagcagttacaagccttcaaaaatgaagtaggagtactcaggtgagcttgtgtgaattactcttttccagagaaagaagttatttttattagctcctggttcccagtggtagcaactattagctttacagatttactcaaaatgaataaatttgtagaaacagagtatgtctgagtatatttttgtctttaaccacattcttttaagtagtatgcaatgttatatggtatggctgatagaatacttagtcctagactgaattaatggaagtatagtattctgataatataaagtaatagttctacttatgaaaagaatactctccagttttaagcttatcagaatacatttagaggtggtatttagtcctgggctctggaattttagaaacattgacaaactaggatatgcctagtgaggaccacctaaatagggaagattctagaggtgtaacgggggaaaataatcaacagaactgaggatatttagttcacagaaggctgttatgttcaagagagtgcacagttattccagagtgcgg

SEQ ID NO: 155 - DNA, 1177 bp, Homo sapiens
agaggtgtaacgggggaaaataatcaacagaactgaggatatttagttcacagaaggctgttatgttcaagagagtgcacagttattccagagtgcggaaaaaaaagttattccagagagcagaccagggaagcaagccagaggtgaaagttgtaagaaaatgattttgtctcaacacttggaaactttataataccagaaccacttaaataaagatatgagagtcagctacaactgagtgatgaacttcccatagttgaaggtatttaagcaacctctagttgcctgtcagatatatttaaaaagatatctctgcataaagtaggaggttagacttggcaattgccagtctcttctaaatgtatccttttgttgccttttttaaaaaaaaaaaagctttttctgacaacattttaccgacagactactttggttctcttttgtaagaattgctaaagtttgtcgacatttaatgtttactgtcacatttctttgtacaggaaaacacgacatgtgaatatcctactcttcatgggctattccacaaagccacaactggctattgttacccagtggtgtgagggctccagcttgtatcaccatctccatatcattgagaccaaatttgagatgatcaaacttatagatattgcacgacagactgcacagggcatggagtaagttccattcgttaaatgtcttgtaaattatttttgaagaccattgaggatgttttaaaggttttggctgctattcttttggattgcattttaaattactgtccaggaacataaggatgctaactaatggctggtaaataatatgatactaaaaaataaatgtctctgtctagtgcagccttcagaacatatatcaagtatttgataataaatacatgactgcaaacttaggcttagcactcagtgattgagctaagcaagagaggttcagaagatagaaacagcaaaaacctgctaaaaagttgttagcagttgtgcaagtaaacagaatggttgttagttactttttcaaatcagtttctctgagtgcccgtatttttggttgcaaaatggtcagttaataaagttaaagtgaaaaatctgcattctgaccctttttgaggatttcagagtgagttcctatctgttgaattttgctatgcaatttaaggagttat

SEQ ID NO: 156 - DNA, 1047 bp, Homo sapiens
actacataagttgagcagtgaaagagcactttcagttcggttagtcatgggaaagcttcactcaggagttagaatttgtattcagttttaaaggatggatatgaataggtggaaaatagaacgaaagctaacttggagggttgggtgtaggaggggagcattgaacacagtggtgggattaaatatcaaggtatatttaagggacatggataaataggcttgactggagtgaaaggtttgtattggtaactagtaaaagataaagcaaagtcttttaatagaaaacaagattttgactgtaccattatagtgatatgttcctataatcttaaattcatttacagtctattttaatattctgtgaagggtttattacaatgtactattttcagttgtatcatgattctaaataagtctttacacccccaagtatgttctgtagatttcgaggccagagtcctttagccctactcaggttaaaatgatgttttgtttttcagttacttacacgccaagtcaatcatccacagagacctcaagagtaatagtatccttcctgaaatttgtctgcgaagtttgaaaacatcctgactttttcttctgcattttgtcttcacattatgtaaaaacagttttcatgctaagttcgatatactgtaaagagaattaataaaggattgtgcatgcatgtataggagagcaggataccacagcctgcttttggtttctcgacaactgaacattacaagaaaatctatcagaagtctttacaatagtaggagtttttgattgcttgcttacattttatcagcactataaaactgatagttttgtagctatctattagtccctttcagacctctgaccttgctcagtggtagttgagatataactgaagactctaaattatataacaatgaggtgagaaaaacataatatttctcttccctaagtgcagactaagatactatctgcagcatcttcattccaatgaagagcctttactgctcgcccaggagtgccaagagaatatctgggcctacattg

SEQ ID NO: 157 - DNA, 1119 bp, Homo sapiens
ctattagtccctttcagacctctgaccttgctcagtggtagttgagatataactgaagactctaaattatataacaatgaggtgagaaaaacataatatttctcttccctaagtgcagactaagatactatctgcagcatcttcattccaatgaagagcctttactgctcgcccaggagtgccaagagaatatctgggcctacattgctaaaatctaatgggaaagttttaggttctcctataaacttaggaaagcatctcacctcatcctaacacatttcaagccccaaaaatcttaaaagcaggttatataggctaaatagaactaatcattgttttagacatacttattgactctaagaggaaagatgaagtactatgttttaaagaatattatattacagaattatagaaattagatctcttacctaaactcttcataatgcttgctctgataggaaaatgagatctactgttttcctttacttactacacctcagatatatttcttcatgaagacctcacagtaaaaataggtgattttggtctagctacagtgaaatctcgatggagtgggtcccatcagtttgaacagttgtctggatccattttgtggatggtaagaattgaggctatttttccactgattaaatttttggccctgagatgctgctgagttactagaaagtcattgaaggtctcaactatagtattttcatagttcccagtattcacaaaaatcagtgttcttattttttatgtaaatagattttttaacttttttctttacccttaaaacgaatattttgaaaccagtttcagtgtatttcaaacaaaaatatatgtcttataaacagtgtttcatattttattcttaaataaatatgaacccttaaaacgaatattttgaaaccagtttcagtgtatttcaaacaaaaatatatgtcttataaacagtgtttcatattttattctaaattgtttaaagtattttgtgttcaaaatgttctgtgtaccctgttgaaaaaaaaaacaggtatgcaatttaaggcaggtgtgatccacagccattattatggttttgctaagagaactactccttttaacagagaagctgtt

SEQ ID NO: 158 - DNA, 1132 bp, Homo sapiens
tttatcagtcctgaaattctaccattattttctaaggtgtcctcagatgagaaaagttgtttgtaccaatgggaaaacttaaattgtaagacagttactacagtagttgtgctgctcctaagcatcttataaccacaagtctagtatttctttgctgaatcaggaatgggaagtgggaactgattctaatagggtaagtcatgggaagaattcatctggcaatgatggtattttctgcagaaagattgcctaaataattactaaattataaaatcttagtaatacaatacaaaatctctgctaatactgtctctttctgagtatgtagaggtttttttcttcagcttaatcagttttatttctttgactattaagagaattgattacatattagacaggtgttttaatggtaaaagcattgctctaggaattatagtaggttgtttttcagtctttattcaattgaagtgaagaatatttttctttgtatgttctaacaggcaccagaagtcatcagaatgcaagataaaaatccatacagctttcagtcagatgtatatgcatttggaattgttctgtatgaattgatgactggacagttaccttattcaaacatcaacaacagggaccaggtaaatatttaccacgtcttggtgtttattttaccgtctatatacaaggctccagttgtagaaaataagtgttaactcctgggtaagcgtgaaggatagatttcttgattttttgttaccagttttagaaatcgtttgtatacttttggcagtaatagcaacacgttaagtcctttcctcagaatatcagtcatgaatgttacaatggaataaaattcctgattttctgactagaaactacagttacaagaatggatatttcttgaccatcgcacaattagaagaatgagctctgctactatagcatctgggcattatacttttcactgtatcacagattgtgctgtcagaacaggtactcagctatgagatctttatattaaattcttttaaaattactaaggtttcttgaaatctttaatttttaaaactaggtaaatggaagaaatcatgctttgatttttctataatgagaatgctagtaggagggtaatttttta

SEQ ID NO: 159 - DNA, 1135 bp, Homo sapiens
tctggtttgtataaccaagtggcccattagcgtttccacaataaaagggcttaagatgcagatgccaaaacgactgctaaaatgttaacctttttggttttccctacacatatatagaggacttaacacaacgtccaacaacaagaagtgctgaataaattttttttttttttaaagtaaagaagaggcactgtcagatctgttttagatggttaccctgtgagtgggaaaatggactggataaagagagaccaaaagcaggggagcaattagagaacctttgccacagtccaaggatcatgaagatttgagcttgcactccttttgtgggtttcccaccatctatgatgtggcattggttttttaaaactttttattgaggtgtaatacatacatcgtaagctgtaaatgtacagcttattgtgttttcaatgagtgtgaagtatatttttcaacttatctacaaggttgaattatttcccttttttttctctctccagataatttttatggtgggacgaggatacctgtctccagatctcagtaaggtacggagtaactgtccaaaagccatgaagagattaatggcagagtgcctcaaaaagaaaagagatgagagaccactctttccccaagtaagtaaaagcttcatgctatccaaaagaacagactaacattcatagacagatttctgagcacttttttgggcacacagtgtgtatttcatgagtttggattctatgtgcagactccagacaagaaaacacattaagatggcttcatgagggttgagcagtggcacacctagaaattttgggtcctaatacaaaatattcagaaagactttgcatttgtccatcagttctcagacttctcagtctttgaactcttttacacatttaaaaattatcgaagacccccccccccacaaagagcttttgtttatataagttttaattccttattagaaattaaaactattttttaaaatattaatgaattaaacatagtaaaccaatatgttaaataatatttagaaaaaaacagttctattatctaagagaaaaaaattagtgaggagttgtattgttttactttttttgcaaatccctttgcaaaaagaagacagctggat

SEQ ID NO: 160 - DNA, 1758 bp, Homo sapiens
ttctgctttcaattaggtgtatgtaaaacatttcccatggctaggtttctttaaagggcaagtagctgtgataattctgtttagagatagtcataaagtgctttacttatttatactccatcttcttcccaaaagagacttgtggtctataacaaaaaggtataaaattggttttaaatttctattatttactgtttcaagactaacaaatgatctaaaatataaataaaagctgactaagaattactctccccatttaatttacagagagagtttcttcttaagaaaaaataccaattatttacaaatattttcccaagcatttatgacaatgctgaaaacaatgtaagatttcaggtgctttcttgtaaagtgtgatgggactcttaaagatttataccacccagattttcattcttctttctgttttttctttttctttctttctttttttttcttttttctttttttttcttttttttttctttttttttttgtagattctcgcctctattgagctgctggcccgctcattgccaaaaattcaccgcagtgcatcagaaccctccttgaatcgggctggtttccaaacagaggattttagtctatatgcttgtgcttctccaaaaacacccatccaggcagggggatatggtgcgtttcctgtccactgaaacaaatgagtgagagagttcaggagagtagcaacaaaaggaaaataaatgaacatatgtttgcttatatgttaaattgaataaaatactctctttttttttaaggtgaaccaaagaacacttgtgtggttaaagactagatataatttttccccaaactaaaatttatacttaacattggatttttaacatccaagggttaaaatacatagacattgctaaaaattggcagagcctcttctagaggctttactttctgttccgggtttgtatcattcacttggttattttaagtagtaaacttcagtttctcatgcaacttttgttgccagctatcacatgtccactagggactccagaagaagaccctacctatgcctgtgtttgcaggtgagaagttggcagtcggttagcctgggttagataaggcaaactgaacagatctaatttaggaagtcagtagaatttaataattctattattattcttaataatttttctataactatttctttttataacaatttggaaaatgtggatgtcttttatttccttgaagcaataaactaagtttctttttataaattttgagtgcaggtgaccaaaaatattgctgaggagtggcacgtttgacatgagtaaaatgtcttaacttcggatttttagcgggaaaatgttataaattggagtttcttttaaatagctttttttaaaatacattaaggatgtctcgctcatgtagaagtcaaattttgttgcaaacgcattgctcccttcacacccaatctctcccctgcaaaaaatcttcacagaattctgtgagaacttttaggtgtgtttttctttgagatacctctggttgccaaacaccaggtaatagattttttaaagttgttattagattattcttacctctcatgatgcatattttagcaatcaccttatcattgtgtctcatgttctgtcctccttatattctttgcccagcaagattctacttatgatgaatgaatgctcttctccttttttcattcaatggtatgaagtatttgttagggttctttagtacttacactttgttgtg

SEQ ID NO: 161 - DNA, 1500 bp, Homo sapiens
aatactctctttttttttaaggtgaaccaaagaacacttgtgtggttaaagactagatataatttttccccaaactaaaatttatacttaacattggatttttaacatccaagggttaaaatacatagacattgctaaaaattggcagagcctcttctagaggctttactttctgttccgggtttgtatcattcacttggttattttaagtagtaaacttcagtttctcatgcaacttttgttgccagctatcacatgtccactagggactccagaagaagaccctacctatgcctgtgtttgcaggtgagaagttggcagtcggttagcctgggttagataaggcaaactgaacagatctaatttaggaagtcagtagaatttaataattctattattattcttaataatttttctataactatttctttttataacaatttggaaaatgtggatgtcttttatttccttgaagcaataaactaagtttctttttataaattttgagtgcaggtgaccaaaaatattgctgaggagtggcacgtttgacatgagtaaaatgtcttaacttcggatttttagcgggaaaatgttataaattggagtttcttttaaatagctttttttaaaatacattaaggatgtctcgctcatgtagaagtcaaattttgttgcaaacgcattgctcccttcacacccaatctctcccctgcaaaaaatcttcacagaattctgtgagaacttttaggtgtgtttttctttgagatacctctggttgccaaacaccaggtaatagattttttaaagttgttattagattattcttacctctcatgatgcatattttagcaatcaccttatcattgtgtctcatgttctgtcctccttatattctttgcccagcaagattctacttatgatgaatgaatgctcttctccttttttcattcaatggtatgaagtatttgttagggttctttagtacttacactttgttgtgtagaaaatgactgtaatgtggtggtcagtgtattcttactgtgattcagagggaatcaaaagtagaaagcaacagcacgtggtcctatcaaagatttggccatctctgcttcactgtcagcctcttaactatatcttcacttactcaatttggttttgtcatgatttttaaatgtagccaatagatcaaggttcttccagtaaacacatatctgcataaatgcctccttgaagtcaataaagaaggaaattgagaagactttaaattaatgataatttagtttttaagtacccacaaataaatttttgaaacattttctttatttgaatacttagatgtcatccaggaaaatcactcaataataattacggcaaatctttaacccctcatttgggtagcttaagataagtaatgccattatgaatcagaattgattcatgactttagttaagaaaatgaaaaggaacatttcacgtatttttaaaaatgatactaaggaa

SEQ ID NO: 162 - DNA, 7224 bp, Homo sapiens
gtaccttgatttcgtattctgagaggctgctgcttagcggtagccccttggtttccgtggcaacggaaaagcgcgggaattacagataaattaaaactgcgactgcgcggcgtgagctcgctgagacttcctggacgggggacaggctgtggggtttctcagataactgggcccctgcgctcaggaggccttcaccctctgctctgggtaaagttcattggaacagaaagaaatggatttatctgctcttcgcgttgaagaagtacaaaatgtcattaatgctatgcagaaaatcttagagtgtcccatctgtctggagttgatcaaggaacctgtctccacaaagtgtgaccacatattttgcaaattttgcatgctgaaacttctcaaccagaagaaagggccttcacagtgtcctttatgtaagaatgatataaccaaaaggagcctacaagaaagtacgagatttagtcaacttgttgaagagctattgaaaatcatttgtgcttttcagcttgacacaggtttggagtatgcaaacagctataattttgcaaaaaaggaaaataactctcctgaacatctaaaagatgaagtttctatcatccaaagtatgggctacagaaaccgtgccaaaagacttctacagagtgaacccgaaaatccttccttgcaggaaaccagtctcagtgtccaactctctaaccttggaactgtgagaactctgaggacaaagcagcggatacaacctcaaaagacgtctgtctacattgaattgggatctgattcttctgaagataccgttaataaggcaacttattgcagtgtgggagatcaagaattgttacaaatcacccctcaaggaaccagggatgaaatcagtttggattctgcaaaaaaggctgcttgtgaattttctgagacggatgtaacaaatactgaacatcatcaacccagtaataatgatttgaacaccactgagaagcgtgcagctgagaggcatccagaaaagtatcagggtagttctgtttcaaacttgcatgtggagccatgtggcacaaatactcatgccagctcattacagcatgagaacagcagtttattactcactaaagacagaatgaatgtagaaaaggctgaattctgtaataaaagcaaacagcctggcttagcaaggagccaacataacagatgggctggaagtaaggaaacatgtaatgataggcggactcccagcacagaaaaaaaggtagatctgaatgctgatcccctgtgtgagagaaaagaatggaataagcagaaactgccatgctcagagaatcctagagatactgaagatgttccttggataacactaaatagcagcattcagaaagttaatgagtggttttccagaagtgatgaactgttaggttctgatgactcacatgatggggagtctgaatcaaatgccaaagtagctgatgtattggacgttctaaatgaggtagatgaatattctggttcttcagagaaaatagacttactggccagtgatcctcatgaggctttaatatgtaaaagtgaaagagttcactccaaatcagtagagagtaatattgaagacaaaatatttgggaaaacctatcggaagaaggcaagcctccccaacttaagccatgtaactgaaaatctaattataggagcatttgttactgagccacagataatacaagagcgtcccctcacaaataaattaaagcgtaaaaggagacctacatcaggccttcatcctgaggattttatcaagaaagcagatttggcagttcaaaagactcctgaaatgataaatcagggaactaaccaaacggagcagaatggtcaagtgatgaatattactaatagtggtcatgagaataaaacaaaaggtgattctattcagaatgagaaaaatcctaacccaatagaatcactcgaaaaagaatctgctttcaaaacgaaagctgaacctataagcagcagtataagcaatatggaactcgaattaaatatccacaattcaaaagcacctaaaaagaataggctgaggaggaagtcttctaccaggcatattcatgcgcttgaactagtagtcagtagaaatctaagcccacctaattgtactgaattgcaaattgatagttgttctagcagtgaagagataaagaaaaaaaagtacaaccaaatgccagtcaggcacagcagaaacctacaactcatggaaggtaaagaacctgcaactggagccaagaagagtaacaagccaaatgaacagacaagtaaaagacatgacagcgatactttcccagagctgaagttaacaaatgcacctggttcttttactaagtgttcaaataccagtgaacttaaagaatttgtcaatcctagccttccaagagaagaaaaagaagagaaactagaaacagttaaagtgtctaataatgctgaagaccccaaagatctcatgttaagtggagaaagggttttgcaaactgaaagatctgtagagagtagcagtatttcattggtacctggtactgattatggcactcaggaaagtatctcgttactggaagttagcactctagggaaggcaaaaacagaaccaaataaatgtgtgagtcagtgtgcagcatttgaaaaccccaagggactaattcatggttgttccaaagataatagaaatgacacagaaggctttaagtatccattgggacatgaagttaaccacagtcgggaaacaagcatagaaatggaagaaagtgaacttgatgctcagtatttgcagaatacattcaaggtttcaaagcgccagtcatttgctccgttttcaaatccaggaaatgcagaagaggaatgtgcaacattctctgcccactctgggtccttaaagaaacaaagtccaaaagtcacttttgaatgtgaacaaaaggaagaaaatcaaggaaagaatgagtctaatatcaagcctgtacagacagttaatatcactgcaggctttcctgtggttggtcagaaagataagccagttgataatgccaaatgtagtatcaaaggaggctctaggttttgtctatcatctcagttcagaggcaacgaaactggactcattactccaaataaacatggacttttacaaaacccatatcgtataccaccactttttcccatcaagtcatttgttaaaactaaatgtaagaaaaatctgctagaggaaaactttgaggaacattcaatgtcacctgaaagagaaatgggaaatgagaacattccaagtacagtgagcacaattagccgtaataacattagagaaaatgtttttaaagaagccagctcaagcaatattaatgaagtaggttccagtactaatgaagtgggctccagtattaatgaaataggttccagtgatgaaaacattcaagcagaactaggtagaaacagagggccaaaattgaatgctatgcttagattaggggttttgcaacctgaggtctataaacaaagtcttcctggaagtaattgtaagcatcctgaaataaaaaagcaagaatatgaagaagtagttcagactgttaatacagatttctctccatatctgatttcagataacttagaacagcctatgggaagtagtcatgcatctcaggtttgttctgagacacctgatgacctgttagatgatggtgaaataaaggaagatactagttttgctgaaaatgacattaaggaaagttctgctgtttttagcaaaagcgtccagaaaggagagcttagcaggagtcctagccctttcacccatacacatttggctcagggttaccgaagaggggccaagaaattagagtcctcagaagagaacttatctagtgaggatgaagagcttccctgcttccaacacttgttatttggtaaagtaaacaatataccttctcagtctactaggcatagcaccgttgctaccgagtgtctgtctaagaacacagaggagaatttattatcattgaagaatagcttaaatgactgcagtaaccaggtaatattggcaaaggcatctcaggaacatcaccttagtgaggaaacaaaatgttctgctagcttgttttcttcacagtgcagtgaattggaagacttgactgcaaatacaaacacccaggatcctttcttgattggttcttccaaacaaatgaggcatcagtctgaaagccagggagttggtctgagtgacaaggaattggtttcagatgatgaagaaagaggaacgggcttggaagaaaataatcaagaagagcaaagcatggattcaaacttaggtgaagcagcatctgggtgtgagagtgaaacaagcgtctctgaagactgctcagggctatcctctcagagtgacattttaaccactcagcagagggataccatgcaacataacctgataaagctccagcaggaaatggctgaactagaagctgtgttagaacagcatgggagccagccttctaacagctacccttccatcataagtgactcttctgcccttgaggacctgcgaaatccagaacaaagcacatcagaaaaagcagtattaacttcacagaaaagtagtgaataccctataagccagaatccagaaggcctttctgctgacaagtttgaggtgtctgcagatagttctaccagtaaaaataaagaaccaggagtggaaaggtcatccccttctaaatgcccatcattagatgataggtggtacatgcacagttgctctgggagtcttcagaatagaaactacccatctcaagaggagctcattaaggttgttgatgtggaggagcaacagctggaagagtctgggccacacgatttgacggaaacatcttacttgccaaggcaagatctagagggaaccccttacctggaatctggaatcagcctcttctctgatgaccctgaatctgatccttctgaagacagagccccagagtcagctcgtgttggcaacataccatcttcaacctctgcattgaaagttccccaattgaaagttgcagaatctgcccagagtccagctgctgctcatactactgatactgctgggtataatgcaatggaagaaagtgtgagcagggagaagccagaattgacagcttcaacagaaagggtcaacaaaagaatgtccatggtggtgtctggcctgaccccagaagaatttatgctcgtgtacaagtttgccagaaaacaccacatcactttaactaatctaattactgaagagactactcatgttgttatgaaaacagatgctgagtttgtgtgtgaacggacactgaaatattttctaggaattgcgggaggaaaatgggtagttagctatttctgggtgacccagtctattaaagaaagaaaaatgctgaatgagcatgattttgaagtcagaggagatgtggtcaatggaagaaaccaccaaggtccaaagcgagcaagagaatcccaggacagaaagatcttcagggggctagaaatctgttgctatgggcccttcaccaacatgcccacagatcaactggaatggatggtacagctgtgtggtgcttctgtggtgaaggagctttcatcattcacccttggcacaggtgtccacccaattgtggttgtgcagccagatgcctggacagaggacaatggcttccatgcaattgggcagatgtgtgaggcacctgtggtgacccgagagtgggtgttggacagtgtagcactctaccagtgccaggagctggacacctacctgataccccagatcccccacagccactactgactgcagccagccacaggtacagagccacaggaccccaagaatgagcttacaaagtggcctttccaggccctgggagctcctctcactcttcagtccttctactgtcctggctactaaatattttatgtacatcagcctgaaaaggacttctggctatgcaagggtcccttaaagattttctgcttgaagtctcccttggaaatctgccatgagcacaaaattatggtaatttttcacctgagaagattttaaaaccatttaaacgccaccaattgagcaagatgctgattcattatttatcagccctattctttctattcaggctgttgttggcttagggctggaagcacagagtggcttggcctcaagagaatagctggtttccctaagtttacttctctaaaaccctgtgttcacaaaggcagagagtcagacccttcaatggaaggagagtgcttgggatcgattatgtgacttaaagtcagaatagtccttgggcagttctcaaatgttggagtggaacattggggaggaaattctgaggcaggtattagaaatgaaaaggaaacttgaaacctgggcatggtggctcacgcctgtaatcccagcactttgggaggccaaggtgggcagatcactggaggtcaggagttcgaaaccagcctggccaacatggtgaaaccccatctctactaaaaatacagaaattagccggtcatggtggtggacacctgtaatcccagctactcaggtggctaaggcaggagaatcacttcagcccgggaggtggaggttgcagtgagccaagatcataccacggcactccagcctgggtgacagtgagactgtggctcaaaaaaaaaaaaaaaaaaaggaaaatgaaactagaagagatttctaaaagtctgagatatatttgctagatttctaaagaatgtgttctaaaacagcagaagattttcaagaaccggtttccaaagacagtcttctaattcctcattagtaataagtaaaatgtttattgttgtagctctggtatataatccattcctcttaaaatataagacctctggcatgaatatttcatatctataaaatgacagatcccaccaggaaggaagctgttgctttctttgaggtgatttttttcctttgctccctgttgctgaaaccatacagcttcataaataattttgcttgctgaaggaagaaaaagtgtttttcataaacccattatccaggactgtttatagctgttggaaggactaggtcttccctagcccccccagtgtgcaagggcagtgaagacttgattgtacaaaatacgttttgtaaatgttgtgctgttaacactgcaaataaacttggtagcaaacacttccaaaaaaaaaaaaaaaaaa

SEQ ID NO: 163 - DNA, 7287 bp, Homo sapiens
gtaccttgatttcgtattctgagaggctgctgcttagcggtagccccttggtttccgtggcaacggaaaagcgcgggaattacagataaattaaaactgcgactgcgcggcgtgagctcgctgagacttcctggacgggggacaggctgtggggtttctcagataactgggcccctgcgctcaggaggccttcaccctctgctctgggtaaagttcattggaacagaaagaaatggatttatctgctcttcgcgttgaagaagtacaaaatgtcattaatgctatgcagaaaatcttagagtgtcccatctgtctggagttgatcaaggaacctgtctccacaaagtgtgaccacatattttgcaaattttgcatgctgaaacttctcaaccagaagaaagggccttcacagtgtcctttatgtaagaatgatataaccaaaaggagcctacaagaaagtacgagatttagtcaacttgttgaagagctattgaaaatcatttgtgcttttcagcttgacacaggtttggagtatgcaaacagctataattttgcaaaaaaggaaaataactctcctgaacatctaaaagatgaagtttctatcatccaaagtatgggctacagaaaccgtgccaaaagacttctacagagtgaacccgaaaatccttccttgcaggaaaccagtctcagtgtccaactctctaaccttggaactgtgagaactctgaggacaaagcagcggatacaacctcaaaagacgtctgtctacattgaattgggatctgattcttctgaagataccgttaataaggcaacttattgcagtgtgggagatcaagaattgttacaaatcacccctcaaggaaccagggatgaaatcagtttggattctgcaaaaaaggctgcttgtgaattttctgagacggatgtaacaaatactgaacatcatcaacccagtaataatgatttgaacaccactgagaagcgtgcagctgagaggcatccagaaaagtatcagggtagttctgtttcaaacttgcatgtggagccatgtggcacaaatactcatgccagctcattacagcatgagaacagcagtttattactcactaaagacagaatgaatgtagaaaaggctgaattctgtaataaaagcaaacagcctggcttagcaaggagccaacataacagatgggctggaagtaaggaaacatgtaatgataggcggactcccagcacagaaaaaaaggtagatctgaatgctgatcccctgtgtgagagaaaagaatggaataagcagaaactgccatgctcagagaatcctagagatactgaagatgttccttggataacactaaatagcagcattcagaaagttaatgagtggttttccagaagtgatgaactgttaggttctgatgactcacatgatggggagtctgaatcaaatgccaaagtagctgatgtattggacgttctaaatgaggtagatgaatattctggttcttcagagaaaatagacttactggccagtgatcctcatgaggctttaatatgtaaaagtgaaagagttcactccaaatcagtagagagtaatattgaagacaaaatatttgggaaaacctatcggaagaaggcaagcctccccaacttaagccatgtaactgaaaatctaattataggagcatttgttactgagccacagataatacaagagcgtcccctcacaaataaattaaagcgtaaaaggagacctacatcaggccttcatcctgaggattttatcaagaaagcagatttggcagttcaaaagactcctgaaatgataaatcagggaactaaccaaacggagcagaatggtcaagtgatgaatattactaatagtggtcatgagaataaaacaaaaggtgattctattcagaatgagaaaaatcctaacccaatagaatcactcgaaaaagaatctgctttcaaaacgaaagctgaacctataagcagcagtataagcaatatggaactcgaattaaatatccacaattcaaaagcacctaaaaagaataggctgaggaggaagtcttctaccaggcatattcatgcgcttgaactagtagtcagtagaaatctaagcccacctaattgtactgaattgcaaattgatagttgttctagcagtgaagagataaagaaaaaaaagtacaaccaaatgccagtcaggcacagcagaaacctacaactcatggaaggtaaagaacctgcaactggagccaagaagagtaacaagccaaatgaacagacaagtaaaagacatgacagcgatactttcccagagctgaagttaacaaatgcacctggttcttttactaagtgttcaaataccagtgaacttaaagaatttgtcaatcctagccttccaagagaagaaaaagaagagaaactagaaacagttaaagtgtctaataatgctgaagaccccaaagatctcatgttaagtggagaaagggttttgcaaactgaaagatctgtagagagtagcagtatttcattggtacctggtactgattatggcactcaggaaagtatctcgttactggaagttagcactctagggaaggcaaaaacagaaccaaataaatgtgtgagtcagtgtgcagcatttgaaaaccccaagggactaattcatggttgttccaaagataatagaaatgacacagaaggctttaagtatccattgggacatgaagttaaccacagtcgggaaacaagcatagaaatggaagaaagtgaacttgatgctcagtatttgcagaatacattcaaggtttcaaagcgccagtcatttgctccgttttcaaatccaggaaatgcagaagaggaatgtgcaacattctctgcccactctgggtccttaaagaaacaaagtccaaaagtcacttttgaatgtgaacaaaaggaagaaaatcaaggaaagaatgagtctaatatcaagcctgtacagacagttaatatcactgcaggctttcctgtggttggtcagaaagataagccagttgataatgccaaatgtagtatcaaaggaggctctaggttttgtctatcatctcagttcagaggcaacgaaactggactcattactccaaataaacatggacttttacaaaacccatatcgtataccaccactttttcccatcaagtcatttgttaaaactaaatgtaagaaaaatctgctagaggaaaactttgaggaacattcaatgtcacctgaaagagaaatgggaaatgagaacattccaagtacagtgagcacaattagccgtaataacattagagaaaatgtttttaaagaagccagctcaagcaatattaatgaagtaggttccagtactaatgaagtgggctccagtattaatgaaataggttccagtgatgaaaacattcaagcagaactaggtagaaacagagggccaaaattgaatgctatgcttagattaggggttttgcaacctgaggtctataaacaaagtcttcctggaagtaattgtaagcatcctgaaataaaaaagcaagaatatgaagaagtagttcagactgttaatacagatttctctccatatctgatttcagataacttagaacagcctatgggaagtagtcatgcatctcaggtttgttctgagacacctgatgacctgttagatgatggtgaaataaaggaagatactagttttgctgaaaatgacattaaggaaagttctgctgtttttagcaaaagcgtccagaaaggagagcttagcaggagtcctagccctttcacccatacacatttggctcagggttaccgaagaggggccaagaaattagagtcctcagaagagaacttatctagtgaggatgaagagcttccctgcttccaacacttgttatttggtaaagtaaacaatataccttctcagtctactaggcatagcaccgttgctaccgagtgtctgtctaagaacacagaggagaatttattatcattgaagaatagcttaaatgactgcagtaaccaggtaatattggcaaaggcatctcaggaacatcaccttagtgaggaaacaaaatgttctgctagcttgttttcttcacagtgcagtgaattggaagacttgactgcaaatacaaacacccaggatcctttcttgattggttcttccaaacaaatgaggcatcagtctgaaagccagggagttggtctgagtgacaaggaattggtttcagatgatgaagaaagaggaacgggcttggaagaaaataatcaagaagagcaaagcatggattcaaacttaggtgaagcagcatctgggtgtgagagtgaaacaagcgtctctgaagactgctcagggctatcctctcagagtgacattttaaccactcagcagagggataccatgcaacataacctgataaagctccagcaggaaatggctgaactagaagctgtgttagaacagcatgggagccagccttctaacagctacccttccatcataagtgactcttctgcccttgaggacctgcgaaatccagaacaaagcacatcagaaaaagattcgcatatacatggccaaaggaacaactccatgttttctaaaaggcctagagaacatatatcagtattaacttcacagaaaagtagtgaataccctataagccagaatccagaaggcctttctgctgacaagtttgaggtgtctgcagatagttctaccagtaaaaataaagaaccaggagtggaaaggtcatccccttctaaatgcccatcattagatgataggtggtacatgcacagttgctctgggagtcttcagaatagaaactacccatctcaagaggagctcattaaggttgttgatgtggaggagcaacagctggaagagtctgggccacacgatttgacggaaacatcttacttgccaaggcaagatctagagggaaccccttacctggaatctggaatcagcctcttctctgatgaccctgaatctgatccttctgaagacagagccccagagtcagctcgtgttggcaacataccatcttcaacctctgcattgaaagttccccaattgaaagttgcagaatctgcccagagtccagctgctgctcatactactgatactgctgggtataatgcaatggaagaaagtgtgagcagggagaagccagaattgacagcttcaacagaaagggtcaacaaaagaatgtccatggtggtgtctggcctgaccccagaagaatttatgctcgtgtacaagtttgccagaaaacaccacatcactttaactaatctaattactgaagagactactcatgttgttatgaaaacagatgctgagtttgtgtgtgaacggacactgaaatattttctaggaattgcgggaggaaaatgggtagttagctatttctgggtgacccagtctattaaagaaagaaaaatgctgaatgagcatgattttgaagtcagaggagatgtggtcaatggaagaaaccaccaaggtccaaagcgagcaagagaatcccaggacagaaagatcttcagggggctagaaatctgttgctatgggcccttcaccaacatgcccacagatcaactggaatggatggtacagctgtgtggtgcttctgtggtgaaggagctttcatcattcacccttggcacaggtgtccacccaattgtggttgtgcagccagatgcctggacagaggacaatggcttccatgcaattgggcagatgtgtgaggcacctgtggtgacccgagagtgggtgttggacagtgtagcactctaccagtgccaggagctggacacctacctgataccccagatcccccacagccactactgactgcagccagccacaggtacagagccacaggaccccaagaatgagcttacaaagtggcctttccaggccctgggagctcctctcactcttcagtccttctactgtcctggctactaaatattttatgtacatcagcctgaaaaggacttctggctatgcaagggtcccttaaagattttctgcttgaagtctcccttggaaatctgccatgagcacaaaattatggtaatttttcacctgagaagattttaaaaccatttaaacgccaccaattgagcaagatgctgattcattatttatcagccctattctttctattcaggctgttgttggcttagggctggaagcacagagtggcttggcctcaagagaatagctggtttccctaagtttacttctctaaaaccctgtgttcacaaaggcagagagtcagacccttcaatggaaggagagtgcttgggatcgattatgtgacttaaagtcagaatagtccttgggcagttctcaaatgttggagtggaacattggggaggaaattctgaggcaggtattagaaatgaaaaggaaacttgaaacctgggcatggtggctcacgcctgtaatcccagcactttgggaggccaaggtgggcagatcactggaggtcaggagttcgaaaccagcctggccaacatggtgaaaccccatctctactaaaaatacagaaattagccggtcatggtggtggacacctgtaatcccagctactcaggtggctaaggcaggagaatcacttcagcccgggaggtggaggttgcagtgagccaagatcataccacggcactccagcctgggtgacagtgagactgtggctcaaaaaaaaaaaaaaaaaaaggaaaatgaaactagaagagatttctaaaagtctgagatatatttgctagatttctaaagaatgtgttctaaaacagcagaagattttcaagaaccggtttccaaagacagtcttctaattcctcattagtaataagtaaaatgtttattgttgtagctctggtatataatccattcctcttaaaatataagacctctggcatgaatatttcatatctataaaatgacagatcccaccaggaaggaagctgttgctttctttgaggtgatttttttcctttgctccctgttgctgaaaccatacagcttcataaataattttgcttgctgaaggaagaaaaagtgtttttcataaacccattatccaggactgtttatagctgttggaaggactaggtcttccctagcccccccagtgtgcaagggcagtgaagacttgattgtacaaaatacgttttgtaaatgttgtgctgttaacactgcaaataaacttggtagcaaacacttccaaaaaaaaaaaaaaaaaa

SEQ ID NO: 164 - DNA, 7132 bp, Homo sapiens
cttagcggtagccccttggtttccgtggcaacggaaaagcgcgggaattacagataaattaaaactgcgactgcgcggcgtgagctcgctgagacttcctggacgggggacaggctgtggggtttctcagataactgggcccctgcgctcaggaggccttcaccctctgctctggttcattggaacagaaagaaatggatttatctgctcttcgcgttgaagaagtacaaaatgtcattaatgctatgcagaaaatcttagagtgtcccatctgattttgcatgctgaaacttctcaaccagaagaaagggccttcacagtgtcctttatgtaagaatgatataaccaaaaggagcctacaagaaagtacgagatttagtcaacttgttgaagagctattgaaaatcatttgtgcttttcagcttgacacaggtttggagtatgcaaacagctataattttgcaaaaaaggaaaataactctcctgaacatctaaaagatgaagtttctatcatccaaagtatgggctacagaaaccgtgccaaaagacttctacagagtgaacccgaaaatccttccttgcaggaaaccagtctcagtgtccaactctctaaccttggaactgtgagaactctgaggacaaagcagcggatacaacctcaaaagacgtctgtctacattgaattgggatctgattcttctgaagataccgttaataaggcaacttattgcagtgtgggagatcaagaattgttacaaatcacccctcaaggaaccagggatgaaatcagtttggattctgcaaaaaaggctgcttgtgaattttctgagacggatgtaacaaatactgaacatcatcaacccagtaataatgatttgaacaccactgagaagcgtgcagctgagaggcatccagaaaagtatcagggtagttctgtttcaaacttgcatgtggagccatgtggcacaaatactcatgccagctcattacagcatgagaacagcagtttattactcactaaagacagaatgaatgtagaaaaggctgaattctgtaataaaagcaaacagcctggcttagcaaggagccaacataacagatgggctggaagtaaggaaacatgtaatgataggcggactcccagcacagaaaaaaaggtagatctgaatgctgatcccctgtgtgagagaaaagaatggaataagcagaaactgccatgctcagagaatcctagagatactgaagatgttccttggataacactaaatagcagcattcagaaagttaatgagtggttttccagaagtgatgaactgttaggttctgatgactcacatgatggggagtctgaatcaaatgccaaagtagctgatgtattggacgttctaaatgaggtagatgaatattctggttcttcagagaaaatagacttactggccagtgatcctcatgaggctttaatatgtaaaagtgaaagagttcactccaaatcagtagagagtaatattgaagacaaaatatttgggaaaacctatcggaagaaggcaagcctccccaacttaagccatgtaactgaaaatctaattataggagcatttgttactgagccacagataatacaagagcgtcccctcacaaataaattaaagcgtaaaaggagacctacatcaggccttcatcctgaggattttatcaagaaagcagatttggcagttcaaaagactcctgaaatgataaatcagggaactaaccaaacggagcagaatggtcaagtgatgaatattactaatagtggtcatgagaataaaacaaaaggtgattctattcagaatgagaaaaatcctaacccaatagaatcactcgaaaaagaatctgctttcaaaacgaaagctgaacctataagcagcagtataagcaatatggaactcgaattaaatatccacaattcaaaagcacctaaaaagaataggctgaggaggaagtcttctaccaggcatattcatgcgcttgaactagtagtcagtagaaatctaagcccacctaattgtactgaattgcaaattgatagttgttctagcagtgaagagataaagaaaaaaaagtacaaccaaatgccagtcaggcacagcagaaacctacaactcatggaaggtaaagaacctgcaactggagccaagaagagtaacaagccaaatgaacagacaagtaaaagacatgacagcgatactttcccagagctgaagttaacaaatgcacctggttcttttactaagtgttcaaataccagtgaacttaaagaatttgtcaatcctagccttccaagagaagaaaaagaagagaaactagaaacagttaaagtgtctaataatgctgaagaccccaaagatctcatgttaagtggagaaagggttttgcaaactgaaagatctgtagagagtagcagtatttcattggtacctggtactgattatggcactcaggaaagtatctcgttactggaagttagcactctagggaaggcaaaaacagaaccaaataaatgtgtgagtcagtgtgcagcatttgaaaaccccaagggactaattcatggttgttccaaagataatagaaatgacacagaaggctttaagtatccattgggacatgaagttaaccacagtcgggaaacaagcatagaaatggaagaaagtgaacttgatgctcagtatttgcagaatacattcaaggtttcaaagcgccagtcatttgctccgttttcaaatccaggaaatgcagaagaggaatgtgcaacattctctgcccactctgggtccttaaagaaacaaagtccaaaagtcacttttgaatgtgaacaaaaggaagaaaatcaaggaaagaatgagtctaatatcaagcctgtacagacagttaatatcactgcaggctttcctgtggttggtcagaaagataagccagttgataatgccaaatgtagtatcaaaggaggctctaggttttgtctatcatctcagttcagaggcaacgaaactggactcattactccaaataaacatggacttttacaaaacccatatcgtataccaccactttttcccatcaagtcatttgttaaaactaaatgtaagaaaaatctgctagaggaaaactttgaggaacattcaatgtcacctgaaagagaaatgggaaatgagaacattccaagtacagtgagcacaattagccgtaataacattagagaaaatgtttttaaagaagccagctcaagcaatattaatgaagtaggttccagtactaatgaagtgggctccagtattaatgaaataggttccagtgatgaaaacattcaagcagaactaggtagaaacagagggccaaaattgaatgctatgcttagattaggggttttgcaacctgaggtctataaacaaagtcttcctggaagtaattgtaagcatcctgaaataaaaaagcaagaatatgaagaagtagttcagactgttaatacagatttctctccatatctgatttcagataacttagaacagcctatgggaagtagtcatgcatctcaggtttgttctgagacacctgatgacctgttagatgatggtgaaataaaggaagatactagttttgctgaaaatgacattaaggaaagttctgctgtttttagcaaaagcgtccagaaaggagagcttagcaggagtcctagccctttcacccatacacatttggctcagggttaccgaagaggggccaagaaattagagtcctcagaagagaacttatctagtgaggatgaagagcttccctgcttccaacacttgttatttggtaaagtaaacaatataccttctcagtctactaggcatagcaccgttgctaccgagtgtctgtctaagaacacagaggagaatttattatcattgaagaatagcttaaatgactgcagtaaccaggtaatattggcaaaggcatctcaggaacatcaccttagtgaggaaacaaaatgttctgctagcttgttttcttcacagtgcagtgaattggaagacttgactgcaaatacaaacacccaggatcctttcttgattggttcttccaaacaaatgaggcatcagtctgaaagccagggagttggtctgagtgacaaggaattggtttcagatgatgaagaaagaggaacgggcttggaagaaaataatcaagaagagcaaagcatggattcaaacttaggtgaagcagcatctgggtgtgagagtgaaacaagcgtctctgaagactgctcagggctatcctctcagagtgacattttaaccactcagcagagggataccatgcaacataacctgataaagctccagcaggaaatggctgaactagaagctgtgttagaacagcatgggagccagccttctaacagctacccttccatcataagtgactcttctgcccttgaggacctgcgaaatccagaacaaagcacatcagaaaaagcagtattaacttcacagaaaagtagtgaataccctataagccagaatccagaaggcctttctgctgacaagtttgaggtgtctgcagatagttctaccagtaaaaataaagaaccaggagtggaaaggtcatccccttctaaatgcccatcattagatgataggtggtacatgcacagttgctctgggagtcttcagaatagaaactacccatctcaagaggagctcattaaggttgttgatgtggaggagcaacagctggaagagtctgggccacacgatttgacggaaacatcttacttgccaaggcaagatctagagggaaccccttacctggaatctggaatcagcctcttctctgatgaccctgaatctgatccttctgaagacagagccccagagtcagctcgtgttggcaacataccatcttcaacctctgcattgaaagttccccaattgaaagttgcagaatctgcccagagtccagctgctgctcatactactgatactgctgggtataatgcaatggaagaaagtgtgagcagggagaagccagaattgacagcttcaacagaaagggtcaacaaaagaatgtccatggtggtgtctggcctgaccccagaagaatttatgctcgtgtacaagtttgccagaaaacaccacatcactttaactaatctaattactgaagagactactcatgttgttatgaaaacagatgctgagtttgtgtgtgaacggacactgaaatattttctaggaattgcgggaggaaaatgggtagttagctatttctgggtgacccagtctattaaagaaagaaaaatgctgaatgagcatgattttgaagtcagaggagatgtggtcaatggaagaaaccaccaaggtccaaagcgagcaagagaatcccaggacagaaagatcttcagggggctagaaatctgttgctatgggcccttcaccaacatgcccacagatcaactggaatggatggtacagctgtgtggtgcttctgtggtgaaggagctttcatcattcacccttggcacaggtgtccacccaattgtggttgtgcagccagatgcctggacagaggacaatggcttccatgcaattgggcagatgtgtgaggcacctgtggtgacccgagagtgggtgttggacagtgtagcactctaccagtgccaggagctggacacctacctgataccccagatcccccacagccactactgactgcagccagccacaggtacagagccacaggaccccaagaatgagcttacaaagtggcctttccaggccctgggagctcctctcactcttcagtccttctactgtcctggctactaaatattttatgtacatcagcctgaaaaggacttctggctatgcaagggtcccttaaagattttctgcttgaagtctcccttggaaatctgccatgagcacaaaattatggtaatttttcacctgagaagattttaaaaccatttaaacgccaccaattgagcaagatgctgattcattatttatcagccctattctttctattcaggctgttgttggcttagggctggaagcacagagtggcttggcctcaagagaatagctggtttccctaagtttacttctctaaaaccctgtgttcacaaaggcagagagtcagacccttcaatggaaggagagtgcttgggatcgattatgtgacttaaagtcagaatagtccttgggcagttctcaaatgttggagtggaacattggggaggaaattctgaggcaggtattagaaatgaaaaggaaacttgaaacctgggcatggtggctcacgcctgtaatcccagcactttgggaggccaaggtgggcagatcactggaggtcaggagttcgaaaccagcctggccaacatggtgaaaccccatctctactaaaaatacagaaattagccggtcatggtggtggacacctgtaatcccagctactcaggtggctaaggcaggagaatcacttcagcccgggaggtggaggttgcagtgagccaagatcataccacggcactccagcctgggtgacagtgagactgtggctcaaaaaaaaaaaaaaaaaaaggaaaatgaaactagaagagatttctaaaagtctgagatatatttgctagatttctaaagaatgtgttctaaaacagcagaagattttcaagaaccggtttccaaagacagtcttctaattcctcattagtaataagtaaaatgtttattgttgtagctctggtatataatccattcctcttaaaatataagacctctggcatgaatatttcatatctataaaatgacagatcccaccaggaaggaagctgttgctttctttgaggtgatttttttcctttgctccctgttgctgaaaccatacagcttcataaataattttgcttgctgaaggaagaaaaagtgtttttcataaacccattatccaggactgtttatagctgttggaaggactaggtcttccctagcccccccagtgtgcaagggcagtgaagacttgattgtacaaaatacgttttgtaaatgttgtgctgttaacactgcaaataaacttggtagcaaacacttccaaaaaaaaaaaaaaaaaa

SEQ ID NO: 165 - DNA, 3699 bp, Homo sapiens
ttcattggaacagaaagaaatggatttatctgctcttcgcgttgaagaagtacaaaatgtcattaatgctatgcagaaaatcttagagtgtcccatctgtctggagttgatcaaggaacctgtctccacaaagtgtgaccacatattttgcaaattttgcatgctgaaacttctcaaccagaagaaagggccttcacagtgtcctttatgtaagaatgatataaccaaaaggagcctacaagaaagtacgagatttagtcaacttgttgaagagctattgaaaatcatttgtgcttttcagcttgacacaggtttggagtatgcaaacagctataattttgcaaaaaaggaaaataactctcctgaacatctaaaagatgaagtttctatcatccaaagtatgggctacagaaaccgtgccaaaagacttctacagagtgaacccgaaaatccttccttgcaggaaaccagtctcagtgtccaactctctaaccttggaactgtgagaactctgaggacaaagcagcggatacaacctcaaaagacgtctgtctacattgaattgggatctgattcttctgaagataccgttaataaggcaacttattgcagtgtgggagatcaagaattgttacaaatcacccctcaaggaaccagggatgaaatcagtttggattctgcaaaaaaggctgcttgtgaattttctgagacggatgtaacaaatactgaacatcatcaacccagtaataatgatttgaacaccactgagaagcgtgcagctgagaggcatccagaaaagtatcagggtgaagcagcatctgggtgtgagagtgaaacaagcgtctctgaagactgctcagggctatcctctcagagtgacattttaaccactcagcagagggataccatgcaacataacctgataaagctccagcaggaaatggctgaactagaagctgtgttagaacagcatgggagccagccttctaacagctacccttccatcataagtgactcttctgcccttgaggacctgcgaaatccagaacaaagcacatcagaaaaagtattaacttcacagaaaagtagtgaataccctataagccagaatccagaaggcctttctgctgacaagtttgaggtgtctgcagatagttctaccagtaaaaataaagaaccaggagtggaaaggtcatccccttctaaatgcccatcattagatgataggtggtacatgcacagttgctctgggagtcttcagaatagaaactacccatctcaagaggagctcattaaggttgttgatgtggaggagcaacagctggaagagtctgggccacacgatttgacggaaacatcttacttgccaaggcaagatctagagggaaccccttacctggaatctggaatcagcctcttctctgatgaccctgaatctgatccttctgaagacagagccccagagtcagctcgtgttggcaacataccatcttcaacctctgcattgaaagttccccaattgaaagttgcagaatctgcccagagtccagctgctgctcatactactgatactgctgggtataatgcaatggaagaaagtgtgagcagggagaagccagaattgacagcttcaacagaaagggtcaacaaaagaatgtccatggtggtgtctggcctgaccccagaagaatttatgctcgtgtacaagtttgccagaaaacaccacatcactttaactaatctaattactgaagagactactcatgttgttatgaaaacagatgctgagtttgtgtgtgaacggacactgaaatattttctaggaattgcgggaggaaaatgggtagttagctatttctgggtgacccagtctattaaagaaagaaaaatgctgaatgagcatgattttgaagtcagaggagatgtggtcaatggaagaaaccaccaaggtccaaagcgagcaagagaatcccaggacagaaagatcttcagggggctagaaatctgttgctatgggcccttcaccaacatgcccacagatcaactggaatggatggtacagctgtgtggtgcttctgtggtgaaggagctttcatcattcacccttggcacaggtgtccacccaattgtggttgtgcagccagatgcctggacagaggacaatggcttccatgcaattgggcagatgtgtgaggcacctgtggtgacccgagagtgggtgttggacagtgtagcactctaccagtgccaggagctggacacctacctgataccccagatcccccacagccactactgactgcagccagccacaggtacagagccacaggaccccaagaatgagcttacaaagtggcctttccaggccctgggagctcctctcactcttcagtccttctactgtcctggctactaaatattttatgtacatcagcctgaaaaggacttctggctatgcaagggtcccttaaagattttctgcttgaagtctcccttggaaatctgccatgagcacaaaattatggtaatttttcacctgagaagattttaaaaccatttaaacgccaccaattgagcaagatgctgattcattatttatcagccctattctttctattcaggctgttgttggcttagggctggaagcacagagtggcttggcctcaagagaatagctggtttccctaagtttacttctctaaaaccctgtgttcacaaaggcagagagtcagacccttcaatggaaggagagtgcttgggatcgattatgtgacttaaagtcagaatagtccttgggcagttctcaaatgttggagtggaacattggggaggaaattctgaggcaggtattagaaatgaaaaggaaacttgaaacctgggcatggtggctcacgcctgtaatcccagcactttgggaggccaaggtgggcagatcactggaggtcaggagttcgaaaccagcctggccaacatggtgaaaccccatctctactaaaaatacagaaattagccggtcatggtggtggacacctgtaatcccagctactcaggtggctaaggcaggagaatcacttcagcccgggaggtggaggttgcagtgagccaagatcataccacggcactccagcctgggtgacagtgagactgtggctcaaaaaaaaaaaaaaaaaaaggaaaatgaaactagaagagatttctaaaagtctgagatatatttgctagatttctaaagaatgtgttctaaaacagcagaagattttcaagaaccggtttccaaagacagtcttctaattcctcattagtaataagtaaaatgtttattgttgtagctctggtatataatccattcctcttaaaatataagacctctggcatgaatatttcatatctataaaatgacagatcccaccaggaaggaagctgttgctttctttgaggtgatttttttcctttgctccctgttgctgaaaccatacagcttcataaataattttgcttgctgaaggaagaaaaagtgtttttcataaacccattatccaggactgtttatagctgttggaaggactaggtcttccctagcccccccagtgtgcaagggcagtgaagacttgattgtacaaaatacgttttgtaaatgttgtgctgttaacactgcaaataaacttggtagcaaacacttccaaaaaaaaaaaaaaaaaa

SEQ ID NO: 166 - DNA, 3800 bp, Homo sapiens
cttagcggtagccccttggtttccgtggcaacggaaaagcgcgggaattacagataaattaaaactgcgactgcgcggcgtgagctcgctgagacttcctggacgggggacaggctgtggggtttctcagataactgggcccctgcgctcaggaggccttcaccctctgctctggttcattggaacagaaagaaatggatttatctgctcttcgcgttgaagaagtacaaaatgtcattaatgctatgcagaaaatcttagagtgtcccatctgtctggagttgatcaaggaacctgtctccacaaagtgtgaccacatattttgcaaattttgcatgctgaaacttctcaaccagaagaaagggccttcacagtgtcctttatgtaagaatgatataaccaaaaggagcctacaagaaagtacgagatttagtcaacttgttgaagagctattgaaaatcatttgtgcttttcagcttgacacaggtttggagtatgcaaacagctataattttgcaaaaaaggaaaataactctcctgaacatctaaaagatgaagtttctatcatccaaagtatgggctacagaaaccgtgccaaaagacttctacagagtgaacccgaaaatccttccttgcaggaaaccagtctcagtgtccaactctctaaccttggaactgtgagaactctgaggacaaagcagcggatacaacctcaaaagacgtctgtctacattgaattgggatctgattcttctgaagataccgttaataaggcaacttattgcagtgtgggagatcaagaattgttacaaatcacccctcaaggaaccagggatgaaatcagtttggattctgcaaaaaaggctgcttgtgaattttctgagacggatgtaacaaatactgaacatcatcaacccagtaataatgatttgaacaccactgagaagcgtgcagctgagaggcatccagaaaagtatcagggtgaagcagcatctgggtgtgagagtgaaacaagcgtctctgaagactgctcagggctatcctctcagagtgacattttaaccactcagcagagggataccatgcaacataacctgataaagctccagcaggaaatggctgaactagaagctgtgttagaacagcatgggagccagccttctaacagctacccttccatcataagtgactcttctgcccttgaggacctgcgaaatccagaacaaagcacatcagaaaaagtattaacttcacagaaaagtagtgaataccctataagccagaatccagaaggcctttctgctgacaagtttgaggtgtctgcagatagttctaccagtaaaaataaagaaccaggagtggaaaggtcatccccttctaaatgcccatcattagatgataggtggtacatgcacagttgctctgggagtcttcagaatagaaactacccatctcaagaggagctcattaaggttgttgatgtggaggagcaacagctggaagagtctgggccacacgatttgacggaaacatcttacttgccaaggcaagatctagagggaaccccttacctggaatctggaatcagcctcttctctgatgaccctgaatctgatccttctgaagacagagccccagagtcagctcgtgttggcaacataccatcttcaacctctgcattgaaagttccccaattgaaagttgcagaatctgcccagagtccagctgctgctcatactactgatactgctgggtataatgcaatggaagaaagtgtgagcagggagaagccagaattgacagcttcaacagaaagggtcaacaaaagaatgtccatggtggtgtctggcctgaccccagaagaatttatgctcgtgtacaagtttgccagaaaacaccacatcactttaactaatctaattactgaagagactactcatgttgttatgaaaacagatgctgagtttgtgtgtgaacggacactgaaatattttctaggaattgcgggaggaaaatgggtagttagctatttctgggtgacccagtctattaaagaaagaaaaatgctgaatgagcatgattttgaagtcagaggagatgtggtcaatggaagaaaccaccaaggtccaaagcgagcaagagaatcccaggacagaaagatcttcagggggctagaaatctgttgctatgggcccttcaccaacatgcccacagggtgtccacccaattgtggttgtgcagccagatgcctggacagaggacaatggcttccatgcaattgggcagatgtgtgaggcacctgtggtgacccgagagtgggtgttggacagtgtagcactctaccagtgccaggagctggacacctacctgataccccagatcccccacagccactactgactgcagccagccacaggtacagagccacaggaccccaagaatgagcttacaaagtggcctttccaggccctgggagctcctctcactcttcagtccttctactgtcctggctactaaatattttatgtacatcagcctgaaaaggacttctggctatgcaagggtcccttaaagattttctgcttgaagtctcccttggaaatctgccatgagcacaaaattatggtaatttttcacctgagaagattttaaaaccatttaaacgccaccaattgagcaagatgctgattcattatttatcagccctattctttctattcaggctgttgttggcttagggctggaagcacagagtggcttggcctcaagagaatagctggtttccctaagtttacttctctaaaaccctgtgttcacaaaggcagagagtcagacccttcaatggaaggagagtgcttgggatcgattatgtgacttaaagtcagaatagtccttgggcagttctcaaatgttggagtggaacattggggaggaaattctgaggcaggtattagaaatgaaaaggaaacttgaaacctgggcatggtggctcacgcctgtaatcccagcactttgggaggccaaggtgggcagatcactggaggtcaggagttcgaaaccagcctggccaacatggtgaaaccccatctctactaaaaatacagaaattagccggtcatggtggtggacacctgtaatcccagctactcaggtggctaaggcaggagaatcacttcagcccgggaggtggaggttgcagtgagccaagatcataccacggcactccagcctgggtgacagtgagactgtggctcaaaaaaaaaaaaaaaaaaaggaaaatgaaactagaagagatttctaaaagtctgagatatatttgctagatttctaaagaatgtgttctaaaacagcagaagattttcaagaaccggtttccaaagacagtcttctaattcctcattagtaataagtaaaatgtttattgttgtagctctggtatataatccattcctcttaaaatataagacctctggcatgaatatttcatatctataaaatgacagatcccaccaggaaggaagctgttgctttctttgaggtgatttttttcctttgctccctgttgctgaaaccatacagcttcataaataattttgcttgctgaaggaagaaaaagtgtttttcataaacccattatccaggactgtttatagctgttggaaggactaggtcttccctagcccccccagtgtgcaagggcagtgaagacttgattgtacaaaatacgttttgtaaatgttgtgctgttaacactgcaaataaacttggtagcaaacacttccaaaaaaaaaaaaaaaaaa

SEQ ID NO: 167 - DNA, 1500 bp, Homo sapiens
ccacccctagctaacccaggctgcttccttaccagcttcccgccccctggggaggcggcaatgcaaagaccgtccgctgccagctctgccgctatctctgtggggtgaatctaacatggcggacaaagacagtaactagtcccgtttctccgcgttttcgccaagaagattggctcttaccacttgtccctcaaaacgaccaccccattgactggtggcgattgcgtcgacggagacggggcaaaagcaagctgaacccgaaaaataacaaacactggggctgaggggtggaactacgagtgcgcagacatgggccagagcgcatttcccctgccccaggcaaattcggcgctcactgcgtccccgcaggccactgaccttacaagactacttgccccagactcctggggctggatgggaattgtagtctccctaaagagttgtacgtatctttttaaggcctagtttctgctttcaaaatacgaaaacataacactccagtccataactgttgacaagtacaagcgcgcacaggtctccaatctatccactggatttccgtgagaattgtgcccgctctggtattggatgttcctctccataagactacagtttctaaggaacactgtggcgaagacctttcattccgcaacgcatgctggaaataattatttccctccacccccccaacaatccttattacttatatttaccgaaactggagacctccattagggcggaaagagtgggggattgggacctcttcttacgactgctttggacaataggtagcgattctgaccttcgtacagcaattactgtgatgcaataagccgcaactggaagagtagaggctagagggcaggcactttatggcaaactcaggtagaattcttcctcttccgtctctttccttttacgtcatccgggggcagactgggtggccaatccagagccccgagagacgcttggctctttctgtccctcccatcctctgattgtaccttgatttcgtattctgagaggctgctgcttagcggtagccccttggtttccgtggcaacggaaaagcgcgggaattacagataaattaaaactgcgactgcgcggcgtgagctcgctgagacttcctggacgggggacaggctgtggggtttctcagataactgggcccctgcgctcaggaggccttcaccctctgctctgggtaaaggtagtagagtcccgggaaagggacagggggcccaagtgatgctctggggtactggcgtgggagagtggatttccgaagctgacagatgggtattctttgacggggggtaggggcggaacctgagaggcgtaaggcgttgtgaaccctggggaggggggcagtttgtaggtcgcgagggaagcgctgaggatcaggaagggggcactgagtgtccgtgggggaatcctcgtgataggaactggaatatgccttgagggggacactatgtctttaaaaacgtcggctgg

SEQ ID NO: 168 - DNA, 1213 bp, Homo sapiens
gtccataactgttgacaagtacaagcgcgcacaggtctccaatctatccactggatttccgtgagaattgtgcccgctctggtattggatgttcctctccataagactacagtttctaaggaacactgtggcgaagacctttcattccgcaacgcatgctggaaataattatttccctccacccccccaacaatccttattacttatatttaccgaaactggagacctccattagggcggaaagagtgggggattgggacctcttcttacgactgctttggacaataggtagcgattctgaccttcgtacagcaattactgtgatgcaataagccgcaactggaagagtagaggctagagggcaggcactttatggcaaactcaggtagaattcttcctcttccgtctctttccttttacgtcatccgggggcagactgggtggccaatccagagccccgagagacgcttggctctttctgtccctcccatcctctgattgtaccttgatttcgtattctgagaggctgctgcttagcggtagccccttggtttccgtggcaacggaaaagcgcgggaattacagataaattaaaactgcgactgcgcggcgtgagctcgctgagacttcctggacgggggacaggctgtggggtttctcagataactgggcccctgcgctcaggaggccttcaccctctgctctgggtaaaggtagtagagtcccgggaaagggacagggggcccaagtgatgctctggggtactggcgtgggagagtggatttccgaagctgacagatgggtattctttgacggggggtaggggcggaacctgagaggcgtaaggcgttgtgaaccctggggaggggggcagtttgtaggtcgcgagggaagcgctgaggatcaggaagggggcactgagtgtccgtgggggaatcctcgtgataggaactggaatatgccttgagggggacactatgtctttaaaaacgtcggctggtcatgaggtcaggagttccagaccagcctgaccaacgtggtgaaactccgtctctactaaaaatacaaaaattagccgggcgtggtgccgctccagctactcaggaggctgaggcaggagaatcgctagaacccgggaggcggaggttgcagtgagccgagatcgcgccattgcactccagcctgggcgacagagcgagactgtctcaaaaca

SEQ ID NO: 169 - DNA, 1099 bp, Homo sapiens
aaagcgcaagagggaagtagaggagcgtcagtagtaacagatgctgccggcagggatgtgcttgaggaggatccagagatgagagcaggtcactgggaaaggttaggggcggggaggccttgattggtgttggtttggtcgttgttgattttggttttatgcaagaaaaagaaaacaaccagaaacattggagaaagctaaggctaccaccacctacccggtcagtcactcctctgtagctttctctttcttggagaaaggaaaagacccaaggggttggcagcaatatgtgaaaaaattcagaatttatgttgtctaattacaaaaagcaacttctagaatctttaaaaataaaggacgttgtcattagttctttggtttgtattattctaaaaccttccaaatcttaaatttactttattttaaaatgataaaatgaagttgtcattttataaaccttttaaaaagatatatatatatgtttttctaatgtgttaaagttcattggaacagaaagaaatggatttatctgctcttcgcgttgaagaagtacaaaatgtcattaatgctatgcagaaaatcttagagtgtcccatctggtaagtcagcacaagagtgtattaatttgggattcctatgattatctcctatgcaaatgaacagaattgaccttacatactagggaagaaaagacatgtctagtaagattaggctattgtaattgctgattttcttaactgaagaactttaaaaatatagaaaatgattccttgttctccatccactctgcctctcccactcctctccttttcaacacaaatcctgtggtccgggaaagacagggactctgtcttgattggttctgcactggggcaggaatctagtttagattaactggcattttggcttttcttccagctctaaaacaagctccatcacttgaaatggcaaaataaaatcatggatgaggccgagggcggtggcttatgcctgtaatcccagcactttgggaggccaaggtggtaggatcacgaggtcaggagatcgagaccatcctggccaacatggtgaaaccccctctccactaaaaatacaaaaa

SEQ ID NO: 170 - DNA, 1054 bp, Homo sapiens
cattttattattttatttacttgaaattttgaaatacttgaaattttccatattaagttaaaaaggcatttacagtaaacaaaaaaaagttctaggaaggaattcaaaagaaatataagcagaaaattttgtctttatggagcttaaagatgagatgtgcacccacagtgatagtgcagaaaaatatatcactggaaatgaattcgtacgaactattatcaactaatcttttaaatgctgatgatagtatagagtattgaagggatcaatataattctgttttgatatctgaaagctcactgaaggtaaggatcgtattctctgctgtattctcagttcctgacacagcagacatttaataaatattgaacgaacttgaggccttatgttgactcagtcataacagctcaaagttgaacttattcactaagaatagctttatttttaaataaattattgagcctcatttattttctttttctccccccctaccctgctagtctggagttgatcaaggaacctgtctccacaaagtgtgaccacatattttgcaagtaagtttgaatgtgttatgtggctccattattagcttttgtttttgtccttcataacccaggaaacacctaactttatagaagctttactttcttcaattaagtgagaacgaaaaatccaactccatttcattctttctcagagagtatatagttatcaaaagttggttgtaatcatagttcctggtaaagttttgacatatattatctttttttttttttttgagacaaagtctcgctctgtcgcccaggctggagtgcagtggcatgatcttggctcactgcaacctccgccccccgagttcaagcgattcttctacctcagcctcccaggtagctgggactacaggcacccgccaccatgcttggctaatttttgtacttttagtagagataaggtttcaccatattggccaggctggtctcgaactcctgaccttgtgatccacctgcctcggcctcccaaagttctgggattacaggcgtgagccaccacaccc

SEQ ID NO: 171 - DNA, 1078 bp, Homo sapiens
cgcttgatcacagatgtatgtatgagtttatttctgtactgtcaattccattttattgatgtatgtgtctattcttatgctattaccacactttcttgattactatagctttgtggtgaggtgttgagattttaaactaattataagcatcttacatgaactacttaccgtttatatttgattatgcagcatgaaataattatgaatatatcattaaatatgccatattaacttttattaagttttatgtgatcataacagtaagccatatgcatgtaagttcagttttcatagatcattgcttatgtagtttaggtttttgcttatgcagcatccaaaaacaattaggaaactattgcttgtaattcacctgccattactttttaaatggctcttaagggcagttgtgagattatcttttcatggctatttgccttttgagtattctttctacaaaaggaagtaaattaaattgttctttctttctttataatttatagattttgcatgctgaaacttctcaaccagaagaaagggccttcacagtgtcctttatgtaagaatgatataaccaaaaggtatataatttggtaatgatgctaggttggaagcaaccacagtaggaaaaagtagaaattatttaataacatagcgttcctataaaaccattcatcagaaaaatttataaaagagtttttagcacacagtaaattatttccaaagttattttcctgaaagttttatgggacatctgccttatacaggtattagaaacttactgcctttctctaatgcttctagtgtaaaaacttgcagacttatgtaaagtagggctgtatcgccgtgcccccattgtctgttaatcttgtttttatatttttgattgtgtttccttttctttttttttttttttttaagacagggtcctgctctgtcactgaggctggagtgcagtggcgtgatctcggctcactgtagcctctgtctcccagcctcttcctgccttagcctcccaaatagctgggactacaggcacacgctaccatgcccggccaatttttgtattttttgtagagat

SEQ ID NO: 172 - DNA, 1089 bp, Homo sapiens
tcagcctgggcaacatagtgagaccccatcactaccaacaaaataaataaataaatgtacatggtggcatatgcccatagtcctagctacttgggaggctatagtgggaggatagcttgagtacagaagtctgaggctgcagtgagctatgattgtggcactgcatgctagcctgggcaatagagcaagaccctgtctctaaattaaacaaaaaaaaaagtactctagttttctatgcaatgcattatatctgctgtggatttagggcagtattatatcagataattttaggcatttggtaggcttaaatgaatgacaaaaagttactaaatcactgccatcacacggtttatacagatgtcaatgatgtattgattatagaggttttctactgttgctgcatcttatttttatttgtttacatgtcttttcttattttagtgtccttaaaaggttgataatcacttgctgagtgtgtttctcaaacaatttaatttcaggagcctacaagaaagtacgagatttagtcaacttgttgaagagctattgaaaatcatttgtgcttttcagcttgacacaggtttggagtgtaagtgttgaatatcccaagaatgacactcaagtgctgtccatgaaaactcaggaagtttgcacaattactttctatgacgtggtgataagaccttttagtctaggttaattttagttctgtatctgtaatctatttttaaaaaattactcccactggtctcacaccttattttatcaatcgtaaggtgcacatttttcacatcttaacatctctgaaattgggaacattttactattgagggtgtgtcatttgtttaatttgtgtgctttctttcttagtgatacagaaaataatagtgcaacttacattgttggtgtcttagctttagtgaaatacagtattgataggcaaatttcttagtgttaaggtagaaaacaaggactctaaataactttgatggtctgtgtatttgtttttgtttcctaggagtaaaatttccagttgattttttaaaatttgatttttaaaaaaaatcacaggtaaccttaatgcattgt

SEQ ID NO: 173 - DNA, 1140 bp, Homo sapiens
gttaattttagttctgtatctgtaatctatttttaaaaaattactcccactggtctcacaccttattttatcaatcgtaaggtgcacatttttcacatcttaacatctctgaaattgggaacattttactattgagggtgtgtcatttgtttaatttgtgtgctttctttcttagtgatacagaaaataatagtgcaacttacattgttggtgtcttagctttagtgaaatacagtattgataggcaaatttcttagtgttaaggtagaaaacaaggactctaaataactttgatggtctgtgtatttgtttttgtttcctaggagtaaaatttccagttgattttttaaaatttgatttttaaaaaaaatcacaggtaaccttaatgcattgtcttaacacaacaaagagcatacatagggtttctcttggtttctttgattataattcatacatttttctctaactgcaaacataatgttttcccttgtattttacagatgcaaacagctataattttgcaaaaaaggaaaataactctcctgaacatctaaaagatgaagtttctatcatccaaagtatgggctacagaaaccgtgccaaaagacttctacagagtgaacccgaaaatccttccttggtaaaaccatttgttttcttcttcttcttcttcttcttttcttttttttttcttttttttttttgagatggagtcttgctctgtggcccaggctagaagcagtcctcctgccttagcccccttagtagctgggattacaggcacgcgccaccatgccaggctaatttttgtatttttagtagagacggggtttcatcatgttggccaggctggtctcgaactcctaacctcaggtgatccacccacctcggctccccaaattgctgggattacaggtgtgagccactgtgcccggccggtaaaaccattttcatttattctggcaacatctctttattgagcattgtgaatatgttagtgaatgtgctagatgctcatagatttatataaaaagttagtgaagaaggaaagatggtatattaagtggttagacaagtgttctaatcagttagagttcagagaaggtcagggtacctgatataatcaagagagagacctta

SEQ ID NO: 174 - DNA, 1106 bp, Homo sapiens
gacagagcaggactctgtacaccccccaaaacaaaaaaaaaagttatcagatgtgattggaatgtatatcaagtatcagcttcaaaatatgctatattaatacttcaaaaattacacaaataatacataatcaggtttgaaaaatttaagacaacagaaaaaaaaattcaaatcacacatatcccacacattttattattactactactattattttgtagagactgggtctcactctgttgcttatgctggtcttgaactcctggcctcaagcagtcctgctccagcctcccaaagtgctgggattataggcatgagctaccgctcccagccccagacattttagtgtgtaaattcctgggcattttttccaggcatcatacatgttagctgactgatgatggtcaatttattttgtccatggtgtcaagtttctcttcaggaggaaaagcacagaactggccaacaattgcttgactgttctttaccatactgtttagcaggaaaccagtctcagtgtccaactctctaaccttggaactgtgagaactctgaggacaaagcagcggatacaacctcaaaagacgtctgtctacattgaattgggtaagggtctcaggttttttaagtatttaataataattgctggattccttatcttatagttttgccaaaaatcttggtcataatttgtatttgtggtaggcagctttgggaagtgaattttatgagccctatggtgagttataaaaaatgtaaaagacgcagttcccaccttgaagaatcttactttaaaaagggagcaaaagaggccaggcatggtggctcacacctgtaatcccagcactttgggaggccaaagtgggtggatcacctgaggtcgggagttcgagaccagcctagccaacatggagaaactctgtctgtaccaaaaaataaaaaattagccaggtgtggtggcacataactgtaatcccagctactcgggaggctgaggcaggagaatcacttgaacccgggaggtggaggttgcggtgaaccgagatcgcaccattgcactccagcctgggcaaaaatagcgaaactccatctaaaaaaaaaaaaga

SEQ ID NO: 175 - DNA, 1046 bp, Homo sapiens
tgtataactcattagatgcttgtcagacctctgagattgttcctattatacttattttacagatgagaaaattaaggcacagagaagttatgaaatttttccaaggtattaaacctagtaagtggctgagccatgattcaaacctaggaagttagatgtcagagcctgtgctttttttttgtttttgtttttgttttcagtagaaacgggggtctcactttgttggccaggctggtcttgaactcctaacctcaaataatccacccatctcggcctcctcaagtgctgggattacaggtgagagccactgtgcctggcgaagcccatgcctttaaccacttctctgtattacatactagcttaactagcattgtacctgccacagtagatgctcagtaaatatttctagttgaatatctgtttttcaacaagtacatttttttaacccttttaattaagaaaacttttattgatttattttttggggggaaattttttaggatctgattcttctgaagataccgttaataaggcaacttattgcaggtgagtcaaagagaacctttgtctatgaagctggtattttcctatttagttaatattaaggattgatgtttctctctttttaaaaatattttaacttttattttaggttcagggatgtatgtgcagtttgttatataggtaaacacacgacttgggatttggtgtatagatttttttcatcatccgggtactaagcataccccacagttttttgtttgctttctttctgaatttctccctcttcccaccttcctccctcaagtaggctggtgtttctccagactagaatcatggtattggaagaaaccttagagatcatctagtttagttctctcattttatagtggaggaaataccctttttgtttgttggatttagttattagcactgtccaaaggaatttaggataacagtagaactctgcacatgcttgcttctagcagattgttctctaagttcctcatatacagtaatattgacacagcagtaattgtgactga

SEQ ID NO: 176 - DNA, 1077 bp, Homo sapiens
ttgaccattccatttctttctttctctcttttttttttttttttttgagacagagtcttgctctgttgcccaggctggagtacagaggtgtgatctcacctctccgcaacgtctgcctcccaggttgaagccatactcctgcctcagcctctctagtagctgggactacaggcgcgcgccaccacacccggctaatttttgtatttttagtagagatggggtttcaccatgttggccaggctggtcttgaactcatgacctcaagtggtccacccgcctcagcctcccaaagtgctggaattacaggcttgagccaccgtgcccagcaaccatttcatttcaactagaagtttctaaaggagagagcagctttcactaactaaataagattggtcagctttctgtaatcgaaagagctaaaatgtttgatcttggtcatttgacagttctgcatacatgtaactagtgtttcttattaggactctgtcttttccctatagtgtgggagatcaagaattgttacaaatcacccctcaaggaaccagggatgaaatcagtttggattctgcaaaaaagggtaatggcaaagtttgccaacttaacaggcactgaaaagagagtgggtagatacagtactgtaattagattattctgaagaccatttgggacctttacaacccacaaaatctcttggcagagttagagtatcattctctgtcaaatgtcgtggtatggtctgatagatttaaatggtactagactaatgtacctataataagaccttctgtaactgattgttgccctttcgtttttttttttgtttgtttgtttgtttttttttgagatggggtctcactctgttgcccaggctggagtgcagtgatgcaatcttggctcactgcaacctccacctccaaggctcaagctatcctcccacttcagcctcctgagtagctgggactacaggcgcatgccaccacacccggttaattttttgtggttttatagagatggggtttcaccatgttaccgaggctggtctcaaactcctggactcaagcagtctgcccacttcag

SEQ ID NO: 177 - DNA, 4426 bp, Homo sapiens
gtctgcccacttcagcctcccaaagtgctgcagttacaggcttgagccactgtgcctggcctgccctttacttttaattggtgtatttgtgtttcatcttttacctactggtttttaaatatagggagtggtaagtctgtagatagaacagagtattaagtagacttaatggccagtaatctttagagtacatcagaaccagttttctgatggccaatctgcttttaattcactcttagacgttagagaaataggtgtggtttctgcatagggaaaattctgaaattaaaaatttaatggatcctaagtggaaataatctaggtaaataggaattaaatgaaagagtatgagctacatcttcagtatacttggtagtttatgaggttagtttctctaatatagccagttggttgatttccacctccaaggtgtatgaagtatgtatttttttaatgacaattcagtttttgagtaccttgttatttttgtatattttcagctgcttgtgaattttctgagacggatgtaacaaatactgaacatcatcaacccagtaataatgatttgaacaccactgagaagcgtgcagctgagaggcatccagaaaagtatcagggtagttctgtttcaaacttgcatgtggagccatgtggcacaaatactcatgccagctcattacagcatgagaacagcagtttattactcactaaagacagaatgaatgtagaaaaggctgaattctgtaataaaagcaaacagcctggcttagcaaggagccaacataacagatgggctggaagtaaggaaacatgtaatgataggcggactcccagcacagaaaaaaaggtagatctgaatgctgatcccctgtgtgagagaaaagaatggaataagcagaaactgccatgctcagagaatcctagagatactgaagatgttccttggataacactaaatagcagcattcagaaagttaatgagtggttttccagaagtgatgaactgttaggttctgatgactcacatgatggggagtctgaatcaaatgccaaagtagctgatgtattggacgttctaaatgaggtagatgaatattctggttcttcagagaaaatagacttactggccagtgatcctcatgaggctttaatatgtaaaagtgaaagagttcactccaaatcagtagagagtaatattgaagacaaaatatttgggaaaacctatcggaagaaggcaagcctccccaacttaagccatgtaactgaaaatctaattataggagcatttgttactgagccacagataatacaagagcgtcccctcacaaataaattaaagcgtaaaaggagacctacatcaggccttcatcctgaggattttatcaagaaagcagatttggcagttcaaaagactcctgaaatgataaatcagggaactaaccaaacggagcagaatggtcaagtgatgaatattactaatagtggtcatgagaataaaacaaaaggtgattctattcagaatgagaaaaatcctaacccaatagaatcactcgaaaaagaatctgctttcaaaacgaaagctgaacctataagcagcagtataagcaatatggaactcgaattaaatatccacaattcaaaagcacctaaaaagaataggctgaggaggaagtcttctaccaggcatattcatgcgcttgaactagtagtcagtagaaatctaagcccacctaattgtactgaattgcaaattgatagttgttctagcagtgaagagataaagaaaaaaaagtacaaccaaatgccagtcaggcacagcagaaacctacaactcatggaaggtaaagaacctgcaactggagccaagaagagtaacaagccaaatgaacagacaagtaaaagacatgacagcgatactttcccagagctgaagttaacaaatgcacctggttcttttactaagtgttcaaataccagtgaacttaaagaatttgtcaatcctagccttccaagagaagaaaaagaagagaaactagaaacagttaaagtgtctaataatgctgaagaccccaaagatctcatgttaagtggagaaagggttttgcaaactgaaagatctgtagagagtagcagtatttcattggtacctggtactgattatggcactcaggaaagtatctcgttactggaagttagcactctagggaaggcaaaaacagaaccaaataaatgtgtgagtcagtgtgcagcatttgaaaaccccaagggactaattcatggttgttccaaagataatagaaatgacacagaaggctttaagtatccattgggacatgaagttaaccacagtcgggaaacaagcatagaaatggaagaaagtgaacttgatgctcagtatttgcagaatacattcaaggtttcaaagcgccagtcatttgctccgttttcaaatccaggaaatgcagaagaggaatgtgcaacattctctgcccactctgggtccttaaagaaacaaagtccaaaagtcacttttgaatgtgaacaaaaggaagaaaatcaaggaaagaatgagtctaatatcaagcctgtacagacagttaatatcactgcaggctttcctgtggttggtcagaaagataagccagttgataatgccaaatgtagtatcaaaggaggctctaggttttgtctatcatctcagttcagaggcaacgaaactggactcattactccaaataaacatggacttttacaaaacccatatcgtataccaccactttttcccatcaagtcatttgttaaaactaaatgtaagaaaaatctgctagaggaaaactttgaggaacattcaatgtcacctgaaagagaaatgggaaatgagaacattccaagtacagtgagcacaattagccgtaataacattagagaaaatgtttttaaagaagccagctcaagcaatattaatgaagtaggttccagtactaatgaagtgggctccagtattaatgaaataggttccagtgatgaaaacattcaagcagaactaggtagaaacagagggccaaaattgaatgctatgcttagattaggggttttgcaacctgaggtctataaacaaagtcttcctggaagtaattgtaagcatcctgaaataaaaaagcaagaatatgaagaagtagttcagactgttaatacagatttctctccatatctgatttcagataacttagaacagcctatgggaagtagtcatgcatctcaggtttgttctgagacacctgatgacctgttagatgatggtgaaataaaggaagatactagttttgctgaaaatgacattaaggaaagttctgctgtttttagcaaaagcgtccagaaaggagagcttagcaggagtcctagccctttcacccatacacatttggctcagggttaccgaagaggggccaagaaattagagtcctcagaagagaacttatctagtgaggatgaagagcttccctgcttccaacacttgttatttggtaaagtaaacaatataccttctcagtctactaggcatagcaccgttgctaccgagtgtctgtctaagaacacagaggagaatttattatcattgaagaatagcttaaatgactgcagtaaccaggtaatattggcaaaggcatctcaggaacatcaccttagtgaggaaacaaaatgttctgctagcttgttttcttcacagtgcagtgaattggaagacttgactgcaaatacaaacacccaggatcctttcttgattggttcttccaaacaaatgaggcatcagtctgaaagccagggagttggtctgagtgacaaggaattggtttcagatgatgaagaaagaggaacgggcttggaagaaaataatcaagaagagcaaagcatggattcaaacttaggtattggaaccaggtttttgtgtttgccccagtctatttatagaagtgagctaaatgtttatgcttttggggagcacattttacaaatttccaagtatagttaaaggaactgcttcttaaacttgaaacatgttcctcctaaggtgcttttcatagaaaaaagtccttcacacagctaggacgtcatctttgactgaatgagctttaacatcctaattactggtggacttacttctggtttcattttataaaagcaaatccaggtgtcccaaagcaaggaatttaatcattttgtgtgacatgaaagtaaatccagtcctgccaatgagaagaaaaagacacagcaagttgcagcgtttatagtctgcttttacatctgaacctctgtttttgttatttaaggtgaagcagcatctgggtgtgagagtgaaacaagcgtctctgaagactgctcagggctatcctctcagagtgacattttaaccactcaggtaaaaagc

SEQ ID NO: 178 - DNA, 1089 bp, Homo sapiens
tggtctgagtgacaaggaattggtttcagatgatgaagaaagaggaacgggcttggaagaaaataatcaagaagagcaaagcatggattcaaacttaggtattggaaccaggtttttgtgtttgccccagtctatttatagaagtgagctaaatgtttatgcttttggggagcacattttacaaatttccaagtatagttaaaggaactgcttcttaaacttgaaacatgttcctcctaaggtgcttttcatagaaaaaagtccttcacacagctaggacgtcatctttgactgaatgagctttaacatcctaattactggtggacttacttctggtttcattttataaaagcaaatccaggtgtcccaaagcaaggaatttaatcattttgtgtgacatgaaagtaaatccagtcctgccaatgagaagaaaaagacacagcaagttgcagcgtttatagtctgcttttacatctgaacctctgtttttgttatttaaggtgaagcagcatctgggtgtgagagtgaaacaagcgtctctgaagactgctcagggctatcctctcagagtgacattttaaccactcaggtaaaaagcgtgtgtgtgtgtgcacatgcgtgtgtgtggtgtcctttgcattcagtagtatgtatcccacattcttaggtttgctgacatcatctctttgaattaatggcacaattgtttgtggttcattgtctccttaaattagactgtaagcaccttgatggaactcatactaccttttatttcacacacacgcacacgcgcacacacagcctacacatacactgcctagctcattgtagcatactaaatactgattttaatgaataagctaaaccttcgaaacccatttgctaatcccagcactttgggaggccaaggtgggtggatcacctcaggtcagaagtttgagaccagcctggccaacatggtgaaaccccacatctactaaaaatacaaaaattagctgggcgtggtggccaatgccttgtaatcccagctattctggaggctgagacaggagaatcgcctgaacctgggaggcggaggttgcactgagc

SEQ ID NO: 179 - DNA, 1172 bp, Homo sapiens
ttgttgtatttttataaaatgccatagatagagggcttttttcaacattacatcagtctaaaaatcacacatttttatatgaactaacctaaatgtctgatgaatctcacaacaccaagtctttgaaatgtgcccatataaataaaatgttaacagattcatgctaattttaaatatcgatagtgtttaaatgccttaattattttttcactccctagctttaaaagaaaataaccaacttcaaaaggacatcacaataacatcaagtctatttgggggaatttgaggattttttccctcactaacatcatttggaaataatttcatgggcattaattgcatgaatgtggttagattaaaaggtgttcagctagaacttgtagttccatactaggtgatttcaattcctgtgctaaaattaatttgtatgatatattttcatttaatggaaagcttctcaaagtatttcattttcttggtgccatttatcgtttttgaagcagagggataccatgcaacataacctgataaagctccagcaggaaatggctgaactagaagctgtgttagaacagcatgggagccagccttctaacagctacccttccatcataagtgactcttctgcccttgaggacctgcgaaatccagaacaaagcacatcagaaaaaggtgtgtattgttggccaaacactgatatcttaagcaaaattctttccttcccctttatctccttctgaagagtaaggacctagctccaacattttatgatccttgctcagcacatgggtaattatggagccttggttcttgtccctgctcacaactaatataccagtcagagggacccaaggcagtcattcatgttgtcatctgagtacctacaacaagtagatgctatggggagcccatggaagatacatggtatacaacatagctcttgctctattggaagctaagtggaatgggagaaattggtgacaggcaaccccataatttcagaaagctatgaaaaagtactcagacatattccttataacactggtgtcacatcacaaagacctatttaatgtgcttctgatttatagggagagacatcctatacttcaggaactgcactttgatccacagaaagcctagtgatgtagagctcctgttagttcaaaaggaaa

SEQ ID NO: 180 - DNA, 1066 bp, Homo sapiens
cattgcatgaggcccattgtagtaagaagaggaatttatatgctaaatgttctggtgatagaatgacttttctttttttttacagtccaaaggtcttttttttttttttttaacacctattatgccatgaattcatagggaataggttccagctgctcaggctccttcccattggttctcacaaagtgtgcttctctgggtggagcaggctggtgcttcagttgaacccacgtacctttctctttggcttctttctttttctgatcattttccttcacgcgtttcaggaagctgtcttggctcttagagtgtttaatgtgctcaatacgcacattaattctcttggcaagaatcttgcccttaacttgtttacagcgatgccaacagcatgctgggtcacgttgtagacttttccagttttgccatggtaacacttgtggggcattcctttttgaacagtacccgttcccttgatgtctacaatttcacctttcttacagattcgcatatacatggccaaaggaacaactccatgttttctaaaaggcctagagaacatatatcaggtgcctctcctctttccctttgtgttcgtcattttggcaaattactgaaagatggtggttctggccaaaaggaggaatgactttttaatagctgtgtttgtatctgagccttccctctgcctttcattttttttgttttgttttgttttgtttttgtttgagatgaagtttcacttttgttgcccaggctggagtgcaatggtgtgatttcggctcattacaatgtccgcctcagcctcctgggtagctgggattacaggcacccgccaccacgcccagctaatttttgtatttttagtagagacagggtttcaccatgttggccgggctggtctcaaactcctgacctcaggtgatctgtccacctcggcctctcaaagtgctgggattgtaggcgtgagccacatcacctggccacttttttaactctttccaatggttaattccgtttgatatggttccttggaacttgcacattaccctttatcaattatcaccct

SEQ ID NO: 181 - DNA, 1124 bp, Homo sapiens
ctcatgtcttgtttacccccgacatgcagaagctgaaatccccatttcatacagtcttcaatgtggaggcagtagggatggagaaaataatgtactttgtgctctccggtactctttctttcctattgtctgaggggatttgggcataatttattttgctgcagagataaaaatttgttatatatattttttatcattcagggccaaggaatatagattttttttttcagccttgtctcagctgggtgtctttatttactctgtcttaaagtgttccttttattatcattattattttttaatcattgaattccatttggtgctagcatctgtctgttgcattgcttgtgtttataaaattctgcctgatatacttgtttaaaaaccaatttgtgtatcatagattgatgcttttgaaaaaaatcagtattctaacctgaattatcactatcagaacaaagcagtaaagtagatttgttttctcattccatttaaagcagtattaacttcacagaaaagtagtgaataccctataagccagaatccagaaggcctttctgctgacaagtttgaggtgtctgcagatagttctaccagtaaaaataaagaaccaggagtggaaaggtaagaaacatcaatgtaaagatgctgtggtatctgacatctttatttatattgaactctgattgttaatttttttcaccatactttctccagttttttgcatacaggcatttatacacttttattgctctaggatacttcttttgtttaatcctatataggttttttgaacctataacataagctacaacatgagaaatgtgcggttagatagatatgtcccttctgaaggtcagaaaaaaatataatggaggtaaaacctgaacaagcttggaaactgatggtagacttcttcaaggcagcccttgccctaattaaaattcttgtctttctagaaaaagtctagctgttgatttaccacagaaaataataataataattactattattattattttttgagacagggtcgccctgtgtcacctagattgcagtggtgcagtcatggctcactgcatcctccgtttttcaggctcaagcaatcctcccaccttagcctc

SEQ ID NO: 182 - DNA, 1191 bp, Homo sapiens
tctttcctttctttcctttcttcctttctttccttcctcccttccttttcttttctttctttcctttccttttctttcctttctttcctttcctttctttcttgacagagtcttgctctgtcactcaggctggagtgcagtggcgtgatctcggctcactgcaacctctgtctcccaggttcaagcaattttcctgcctcagcctcccgagtagctgagattacaggcgccagccaccacacccagctactgacctgcttttaaacagctgggagatatggtgcctcagaccaacccaaccccatgttatatgtcaaccctgacatattggcaggcaacatgaatccagacttctaggctgtcttgcgggctcttttttgccagtcatttctgatctctctgacatgagctgtttcatttatgctttggctgcccagcaagtatgatttgtcctttcacaattggtggcgatggttttctccttccatttatctttctaggtcatccccttctaaatgcccatcattagatgataggtggtacatgcacagttgctctgggagtcttcagaatagaaactacccatctcaagaggagctcattaaggttgttgatgtggaggagcaacagctggaagagtctgggccacacgatttgacggaaacatcttacttgccaaggcaagatctaggtaatatttcatctgctgtattggaacaaacactttgattttactctgaatcctacataaagatattctggttaaccaacttttagatgtactagtctatcatggacacttttgttatacttaattaagcccactttagaaaaatagctcaagtgttaatcaaggtttacttgaaaattattgaaactgttaatccatctatattttaattaatggtttaactaatgattttgaggatgagggagtcttggtgtactctaaatgtattatttcaggccaggcatagtggctcacgcctgtaatcccagtactccaggaggccgaggcaggtggatcagctgaggtcaggagttcaagacctgtctggccaacatggtgaaaccctgtctctactaaaaatacaaaaaaattaactgggtgtgctagtgcatgcccgtaatcctagctactctggaggctgaggcagcagaatcacttgaacccgggaggcggaggttgcg

SEQ ID NO: 183 - DNA, 1311 bp, Homo sapiens
agccaccgtgctcggcccataaacttttatttttaaaataatgtcatgataaataatattgcttaggtgtctttaatatattagtaacatttctgttttattgtacatcaacatttatattcaaattaatgggtgaagagtactccattggactaggtatatcgtaatttaatctcctattattggacaactacattgtttctaaaattatactattcctatgactaaacctttgcatatatcttttatctccctaggatatatttctaaaactagcattgttgactgaaagtgtaaatacgtgttaaggtgtttgctacataatgccatatttcctttttaggaaactaagctactttggatttccaccaacactgtattcatgtacccatttttctcttaacctaactttattggtctttttaattcttaacagagaccagaactttgtaattcaacattcatcgttgtgtaaattaaacttctcccattcctttcagagggaaccccttacctggaatctggaatcagcctcttctctgatgaccctgaatctgatccttctgaagacagagccccagagtcagctcgtgttggcaacataccatcttcaacctctgcattgaaagttccccaattgaaagttgcagaatctgcccagagtccagctgctgctcatactactgatactgctgggtataatgcaatggaagaaagtgtgagcagggagaagccagaattgacagcttcaacagaaagggtcaacaaaagaatgtccatggtggtgtctggcctgaccccagaagaatttgtgagtgtatccatatgtatctccctaatgactaagacttaacaacattctggaaagagttttatgtaggtattgtcaattaataacctagaggaagaaatctagaaaacaatcacagttctgtgtaatttaatttcgattactaatttctgaaaatttagatctagataaagctatagtgtggattattttatgtatatttacttgagaaaataattattaaatattagtggaaaagctatactttgggtatgatataggactttcgaattggaattttcctttctatctgtaaaagcaagtaggtatagttttattccccagaaggcatctttttctcccccttgtctcacatgggtgaatttaccagcatatttaactaaattcagactggttccaaatgtactgccagatagtagcatttctctagtgtttgttttcatcctggcttgtaagaatgccctgccacttctgccctgcaatatcccttgctattagga

SEQ ID NO: 184 - DNA, 1088 bp, Homo sapiens
acgccattctcctgcctcagcctcctgagtagctgagactacaggtgcccgccaccacgcctggctaattttttgtatttttagtagagacagggtttcaccgtgttagccaggatggtctcgatctcctgaccttgtgatctgcccgcctcagcctcccaaagtgctgagattacaggcgtgagccaccgcgcccagccgagacttcaggtgtcttagaattttttaaatgtaccctttctgagaaaaacagagacttaaagctaggataactggtattctattttttttttttttttttttttacctccagcctgggtgacagagcaagactctgtctaaaaaaaaaaaaaaaaaaattcactttaaatagttccaggacacgtgtagaacgtgcaggattgctacataggtaaacatatgccatggtggaataactagtattctgagctgtgtgctagaggtaactcatgataatggaatatttgatttaatttcagatgctcgtgtacaagtttgccagaaaacaccacatcactttaactaatctaattactgaagagactactcatgttgttatgaaaacaggtataccaagaacctttacagaataccttgcatctgctgcataaaaccacatgaggcgaggcacggtggcgcatgcctgtaatcgcagcactttgggaggccgaggcgggcagatcacgagattaggagatcgagaccatcctggccagcatggtgaaaccccgtctctactaaaaaataaaaaaattagctgggtgtggtcgcgtgcgcctgtagtcccagctactcgtgaggctgaggcaggagaatcacttgaaccggggagatggaggttgcagtgagccgagatcatgccactgcattccagcctggcgacagagcaaggctccgtctcaaaaaaaaaaaaaaaaaacgtgaaaaaataagaatatttgttgagcatagcatggatgatagtcttctaatagtcaatcaattactttatgaaagacaaataatagttttgctgcttccttacctccttttgttttgggttaagatttggagtgtgggccaggcac

SEQ ID NO: 185 - DNA, 1078 bp, Homo sapiens
tctcaggggaatattagagggttaggactccccaggtagacattctaggggtgaaaatttgtcattacattgacatttcagatttaggttttcaacaatactgttttcttctttcacatattgccatctagtaatatagatgttctccgtccacattaatcaaaactattgacatggataattcctaattccttgaacactataatggagatctatagctagccttggcgtctagaagatgggtgttgagaagagggagtggacagatatttcctctggtcttaacttcatatcagcctcccctagacttccaaatatccatacctgctggttataattagtggtgttttcagcctctgattctgtcaccaggggttttagaatcataaatccagattgatcttgggagtgtaaaaaactgaggctctttagcttcttaggacagcacttcctgattttgttttcaacttctaatcctttgagtgtttttcattctgcagatgctgagtttgtgtgtgaacggacactgaaatattttctaggaattgcgggaggaaaatgggtagttagctatttctgtaagtataatactatttctcccctcctccctttaacacctcagaattgcatttttacacctaacgtttaacacctaaggtttttgctgatgctgagtctgagttaccaaaaggtctttaattgtaatactaaactacttttatctttaatatcactttgttcagataagctggtgatgctgggaaaatgggtctcttttataactaataggacctaatctgctcctagcaatgttagcatatgagctagggatttatttaatagtcggcaggaatccatgtgcagcaggcaaacttataatgtttaaattaaacatcaactctgtctccagaaggaaactgctgctacaagccttattaaagggctgtggctttagagggaaggacctctcctctgtcattcttcctgtgctcttttgtgaatcgctgacctctctatctccgtgaaaagagcacgttcttctgctgtatgtaacctgtcttttctatgatctctttag

SEQ ID NO: 186 - DNA, 1041 bp, Homo sapiens
gtaagtataatactatttctcccctcctccctttaacacctcagaattgcatttttacacctaacgtttaacacctaaggtttttgctgatgctgagtctgagttaccaaaaggtctttaattgtaatactaaactacttttatctttaatatcactttgttcagataagctggtgatgctgggaaaatgggtctcttttataactaataggacctaatctgctcctagcaatgttagcatatgagctagggatttatttaatagtcggcaggaatccatgtgcagcaggcaaacttataatgtttaaattaaacatcaactctgtctccagaaggaaactgctgctacaagccttattaaagggctgtggctttagagggaaggacctctcctctgtcattcttcctgtgctcttttgtgaatcgctgacctctctatctccgtgaaaagagcacgttcttctgctgtatgtaacctgtcttttctatgatctctttaggggtgacccagtctattaaagaaagaaaaatgctgaatgaggtaagtacttgatgttacaaactaaccagagatattcattcagtcatatagttaaaaatgtatttgcttccttccatcaatgcaccactttccttaacaatgcacaaattttccatgataatgaggatcatcaagaattatgcaggcctgcactgtggctcatacctataatcccagcgctttgggaggctgaggcgcttggatcacctgatgtcgggagttcaagaccagcctgaccaacatggagaaaccccgtttctactaaaaatacaaaattagccgggcttggtggcacttgcctgtaattccagctactcgggaggctgaggcaggagaatcacttgaacctgggaggcgggggttgcagtgagctgagatcgcatcattgcactctaacctgggcaacaagagcaaaactccatcaaaagaaaaaaaaaatcgggtgcagtggctcatgcctgtaatcctaacactgtgggaggccaagacaggcagattgc

SEQ ID NO: 187 - DNA, 1084 bp, Homo sapiens
tctcgatctcctgacctcgtgatccgcctgtctcggcctcccaaagtcctgggattacaggcgtgagccaccacacccggcctaatttttttttttttaattttatttttaattttttgagatgcgagatggagtctcgctctgttacccaggctggagtgcagtggcaccatctcagctcactgcaacctccacctcctgcattcaaaagattctcctgcctcagcctcccaagtagctgggattacaggtgcctgccaccacgcccaactaattttttgtatttttagtagagatgaggtttcaccatgttggtcagactggtgtcgaactcctgacctcaagtgatctgcctgcctcagtctcccaaagtgctaggattacaggggtgagccactgcgcctggcctgaatgccttaaatatgacgtgtctgctccacttccattgaaggaagcttctctttctcttatcctgatgggttgtgtttggtttctttcagcatgattttgaagtcagaggagatgtggtcaatggaagaaaccaccaaggtccaaagcgagcaagagaatcccaggacagaaaggtaaagctccctccctcaagttgacaaaaatctcaccccaccactctgtattccactcccctttgcagagatgggccgcttcattttgtaagacttattacatacatacacagtgctagatactttcacacaggttcttttttcactcttccatcccaaccacataaataagtattgtctctactttatgaatgataaaactaagagatttagagaggctgtgtaatttggattcccgtctcgggttcagatcttagctgataagtggaagagctgggactttaagcagatgagaatctaaagactttgctcttttcacttcactggggtgtctttctctctctctctcttgctctctctctctctttttttttttcccaagacggagtctcactccattgcccaggccagagtgcagtggtgcgatctcagctcactgaaaactcatcttgcccaggctggtcttgaacccctgaccttgtgatcctcccgccttggcc

SEQ ID NO: 188 - DNA, 1055 bp, Homo sapiens
gtacacctaaaatcaacatagacccctctgttgatggggtcatagtgagtacttgaggtaccaagtctggataaacatcaaacttcagccaataactttgagtttctagccatccaagcctcttattaaacatacagaaggaccttttttcccttgcatctaacaagttaaagcacctgcagagatcattagggaggagccttggcctgattggtgacaaaagtgagatgctcagtccttgaatgacaaagaatgcctgtagagtgcaggtcaactacatatgcacttcaagaagatcttctgaaatccagtagtgttctggacattggactgcttgtccctgggaagtagcagcagaaatcatcaggtggtgaacagaagaaaaagaaaagctcttcctttttgaaagtctgttttttgaataaaagccaatattcttttataactagattttccttctctccattcccctgtccctctctcttcctctcttcttccagatcttcagggggctagaaatctgttgctatgggcccttcaccaacatgcccacaggtaagagcctgggagaaccccagagttccagcaccagcctttgtcttacatagtggagtattataagcaagatcccacgatgggggttcctcagattgctgaaatgttctagaggctattctatttctctaccactctccaaacaaaacagcacctaaatgttatcctatggcaaaaaaaaactataccttgtcccccttctcaagagcatgaaggtggttaatagttaggattcagtatgttatgtgttcagatggcgttgagctgctgttagtgccaacatgttagtgagaaaatatctttggataggtaaaaatcaaggaggagttctcctcttcctaaaccatcttaatttacttacatagaagaaagcacagcagctggcccaccacggacgggcccagagcaggggaagattctcggtgaacatttctttttttttttctttttttttgaggtcgagtctctgttgcccaggccagagtgcaatggcgcgatct

SEQ ID NO: 189 - DNA, 1074 bp, Homo sapiens
ctctaaccaggataacatgtatttttttgactggatgaattatcttcccatctcttgacatttacagtaattaccaccaagtatggtattttcagtggccgtgattatcagttaccaacacagaattaggatgaagggaggaagggagggaaggaaggtgggtgttttttcacacagtgtcttagccagcaatttagcaaattaatggaaattagatctttgatttttttttctttcaagcattttatttgagagactatcaaaccttataccaagtggccttatggagactgataaccagagtacatggcatatcagtggcaaattgacttaaaatccatacccctactattttaagaccattgtcctttggagcagagagacagactctcccattgagaggtcttgctataagccttcatccggagagtgtagggtagagggcctgggttaagtatgcagattactgcagtgattttacatctaaatgtccattttagatcaactggaatggatggtacagctgtgtggtgcttctgtggtgaaggagctttcatcattcacccttggcacagtaagtattgggtgccctgtcagagagggaggacacaatattctctcctgtgagcaagactggcacctgtcagtccctatggatgcccctactgtagcctcagaagtcttctctgcccacatacctgtgccaaaagactccatctgtaagggatgggtaaggatttgagaactgcacatattaaatatactgagggaagactttttccctctaactctttttcccatatgtccctccccctcctctctgtgactgccccagcatactgtgtttcaacaaatcatcaagaaatgatgggctggaggctgggcatggtggctcatgtctgtaatcccagcactttgggaggccgaggcaggtggatcacttgtcaggagtttgagaccagcctggccaacatggtgaaaccccatctgtactaaaaaaaaaaaaacaaaaagtagccaggcctggtggagcatgcctgtaatgccagctatttgggaagttgaggtgtgagc

SEQ ID NO: 190 - DNA, 1061 bp, Homo sapiens
gagaaatgatgggctgggccagtgccccacccctgtaatcacaacactgggaggccaaggtgggagaatcgcttgagcctgggagctgaagaccagcctgggcaatacagtaggacctcatgtctacaaaaaaattattaaaaattagccaaggctgggtgcggtggctcatgcctataatcccgggggtgaagttgagcccaggagtttgagaccagcctgggcaacatggcaaaaccctgtctctaccaaaaatacaaaaaaattagccaggggtggtggtacgtgtctgtagttccagctacttaggaggctgagatggaaggattgcttgagcccaggaggcagaggtggcagtgagctgagatcacaccactgcactccagcctgggtgacagagcaagaccctgtctcaaaaacaaacaaaaaaaatgatgaagtgacagttccagtagtcctactttgacactttgaatgctctttccttcctggggatccagggtgtccacccaattgtggttgtgcagccagatgcctggacagaggacaatggcttccatggtaaggtgcctgcatgtacctgtgctatatggggtccttttgcatgggtttggtttatcactcattacctggtgcttgagtagcacagttcttggcacattttaaatatttgttgaatgaatggctaaaatgtctttttgatgtttttattgttatttgttttatattgtaaaagtaatacatgaactgtttccatggggtgggagtaagatatgaatgttcatcacaaaaacataaatcaaggccgggcatggtggctcatgcctataattccagcactttgggaggtcaagatggaggtcaaggtgggagcctagaagttcgagaccagcctgggcaacataaggagacttcatctgtacaacaaatttaaaaagtagctgggtgtggtggcagatgcctgtagtcgcagctacttgggaagctgaggtgggaggatcacttgagctcaggaggttgatgcttcagtgagccacgatcacaccactgtactccagcct

SEQ ID NO: 191 - DNA, 2508 bp, Homo sapiens
gctgagatcgtgccattgcattccaggctgagcaacaagagcaagactccgtctcaaaaaaaaaaaaaaaaaaaaaaaaaggccaggtgcagtggctcacgcctgtaatcccagcactttgggaggccaaggtgggtggatcacctgaggtcaggagttccagagcagcctggccaacattgtgaaacccccgtctctactaaaaatacaaaaattagctgggtgtgatggcatgtgcctgtaattccagctactcaggaggcagagacaggagaattgcttgaacccaggaggcggaggttgaatgagccgagattgcgccatcacactctagcctcggcgacagagcaagactccgtctcaaaaaaaaaaaaaaaaaattagcttctacctcattaatcctaagaactcatacaaccaggaccctggagtcgattgattagagcctagtccaggagaatgaattgacactaatctctgcttgtgttctctgtctccagcaattgggcagatgtgtgaggcacctgtggtgacccgagagtgggtgttggacagtgtagcactctaccagtgccaggagctggacacctacctgataccccagatcccccacagccactactgactgcagccagccacaggtacagagccacaggaccccaagaatgagcttacaaagtggcctttccaggccctgggagctcctctcactcttcagtccttctactgtcctggctactaaatattttatgtacatcagcctgaaaaggacttctggctatgcaagggtcccttaaagattttctgcttgaagtctcccttggaaatctgccatgagcacaaaattatggtaatttttcacctgagaagattttaaaaccatttaaacgccaccaattgagcaagatgctgattcattatttatcagccctattctttctattcaggctgttgttggcttagggctggaagcacagagtggcttggcctcaagagaatagctggtttccctaagtttacttctctaaaaccctgtgttcacaaaggcagagagtcagacccttcaatggaaggagagtgcttgggatcgattatgtgacttaaagtcagaatagtccttgggcagttctcaaatgttggagtggaacattggggaggaaattctgaggcaggtattagaaatgaaaaggaaacttgaaacctgggcatggtggctcacgcctgtaatcccagcactttgggaggccaaggtgggcagatcactggaggtcaggagttcgaaaccagcctggccaacatggtgaaaccccatctctactaaaaatacagaaattagccggtcatggtggtggacacctgtaatcccagctactcaggtggctaaggcaggagaatcacttcagcccgggaggtggaggttgcagtgagccaagatcataccacggcactccagcctgggtgacagtgagactgtggctcaaaaaaaaaaaaaaaaaaaggaaaatgaaactagaagagatttctaaaagtctgagatatatttgctagatttctaaagaatgtgttctaaaacagcagaagattttcaagaaccggtttccaaagacagtcttctaattcctcattagtaataagtaaaatgtttattgttgtagctctggtatataatccattcctcttaaaatataagacctctggcatgaatatttcatatctataaaatgacagatcccaccaggaaggaagctgttgctttctttgaggtgatttttttcctttgctccctgttgctgaaaccatacagcttcataaataattttgcttgctgaaggaagaaaaagtgtttttcataaacccattatccaggactgtttatagctgttggaaggactaggtcttccctagcccccccagtgtgcaagggcagtgaagacttgattgtacaaaatacgttttgtaaatgttgtgctgttaacactgcaaataaacttggtagcaaacacttccaccatgaatgactgttcttgagacttaggccagccgactttctcagagccttttcactgtgcttcagtctcccactctgtaaaatgggggtaatgatagtatctacctcctaggatttattgaggcagcttaaataccttttgtatttcctgttgctgccaaaacaaattgttgcaaggtcagaagtctgaggtggctcaactgtttctttgtttcaggtttcatgaggccaaaataaaggtgttcgcagggcgtgttcccttctagaggctctgggtccttgcagttctaggactaagatccctgtttcccactggctgttggctgggcatcattctcagcttcttgaggctccccacattcctaggctcctggcctgtctgcctccatcttcaaaaccagcaatgggtggtcaagtttttctcacactgaatcttgctgactactgtatctttctaactcctgccagagacatttctctgtttctaagggctcaagtga

SEQ ID NO: 192 - DNA, 1500 bp, Homo sapiens
actagaagagatttctaaaagtctgagatatatttgctagatttctaaagaatgtgttctaaaacagcagaagattttcaagaaccggtttccaaagacagtcttctaattcctcattagtaataagtaaaatgtttattgttgtagctctggtatataatccattcctcttaaaatataagacctctggcatgaatatttcatatctataaaatgacagatcccaccaggaaggaagctgttgctttctttgaggtgatttttttcctttgctccctgttgctgaaaccatacagcttcataaataattttgcttgctgaaggaagaaaaagtgtttttcataaacccattatccaggactgtttatagctgttggaaggactaggtcttccctagcccccccagtgtgcaagggcagtgaagacttgattgtacaaaatacgttttgtaaatgttgtgctgttaacactgcaaataaacttggtagcaaacacttccaccatgaatgactgttcttgagacttaggccagccgactttctcagagccttttcactgtgcttcagtctcccactctgtaaaatgggggtaatgatagtatctacctcctaggatttattgaggcagcttaaataccttttgtatttcctgttgctgccaaaacaaattgttgcaaggtcagaagtctgaggtggctcaactgtttctttgtttcaggtttcatgaggccaaaataaaggtgttcgcagggcgtgttcccttctagaggctctgggtccttgcagttctaggactaagatccctgtttcccactggctgttggctgggcatcattctcagcttcttgaggctccccacattcctaggctcctggcctgtctgcctccatcttcaaaaccagcaatgggtggtcaagtttttctcacactgaatcttgctgactactgtatctttctaactcctgccagagacatttctctgtttctaagggctcaagtgattagattgcacccacttggtaatccaaagtgatcttcatatcttaaggcccatagccttaattatagctgcaaagtcccttcgcagcagtacctagattactgttggaatgaataaccagaagacagcaatcaagggaggacatctttagaattctgcctaccacttgtatttaacatgcttaatccacagatgacactctctaccattatttcctggtcctcacactgctcagagattggaatcctttttgagcaaagagaatgaagtcatcacatagttcagtcctgctgtatttgctggaaacagtgaaggaagatagagaaaatggagctaactgccaatattacattttatatcagtcttcatcatagccctatgaagtgggtatttgttacctcattggaaaaatgggagttgaatctcaagttccttgtttgtaagattttactcagatttgcacagctaaaaatgactacatggagacccaaagccaccttt

SEQ ID NO: 193 - DNA, 11386 bp, Homo sapiens
gtggcgcgagcttctgaaactaggcggcagaggcggagccgctgtggcactgctgcgcctctgctgcgcctcgggtgtcttttgcggcggtgggtcgccgccgggagaagcgtgaggggacagatttgtgaccggcgcggtttttgtcagcttactccggccaaaaaagaactgcacctctggagcggacttatttaccaagcattggaggaatatcgtaggtaaaaatgcctattggatccaaagagaggccaacattttttgaaatttttaagacacgctgcaacaaagcagatttaggaccaataagtcttaattggtttgaagaactttcttcagaagctccaccctataattctgaacctgcagaagaatctgaacataaaaacaacaattacgaaccaaacctatttaaaactccacaaaggaaaccatcttataatcagctggcttcaactccaataatattcaaagagcaagggctgactctgccgctgtaccaatctcctgtaaaagaattagataaattcaaattagacttaggaaggaatgttcccaatagtagacataaaagtcttcgcacagtgaaaactaaaatggatcaagcagatgatgtttcctgtccacttctaaattcttgtcttagtgaaagtcctgttgttctacaatgtacacatgtaacaccacaaagagataagtcagtggtatgtgggagtttgtttcatacaccaaagtttgtgaagggtcgtcagacaccaaaacatatttctgaaagtctaggagctgaggtggatcctgatatgtcttggtcaagttctttagctacaccacccacccttagttctactgtgctcatagtcagaaatgaagaagcatctgaaactgtatttcctcatgatactactgctaatgtgaaaagctatttttccaatcatgatgaaagtctgaagaaaaatgatagatttatcgcttctgtgacagacagtgaaaacacaaatcaaagagaagctgcaagtcatggatttggaaaaacatcagggaattcatttaaagtaaatagctgcaaagaccacattggaaagtcaatgccaaatgtcctagaagatgaagtatatgaaacagttgtagatacctctgaagaagatagtttttcattatgtttttctaaatgtagaacaaaaaatctacaaaaagtaagaactagcaagactaggaaaaaaattttccatgaagcaaacgctgatgaatgtgaaaaatctaaaaaccaagtgaaagaaaaatactcatttgtatctgaagtggaaccaaatgatactgatccattagattcaaatgtagcaaatcagaagccctttgagagtggaagtgacaaaatctccaaggaagttgtaccgtctttggcctgtgaatggtctcaactaaccctttcaggtctaaatggagcccagatggagaaaatacccctattgcatatttcttcatgtgaccaaaatatttcagaaaaagacctattagacacagagaacaaaagaaagaaagattttcttacttcagagaattctttgccacgtatttctagcctaccaaaatcagagaagccattaaatgaggaaacagtggtaaataagagagatgaagagcagcatcttgaatctcatacagactgcattcttgcagtaaagcaggcaatatctggaacttctccagtggcttcttcatttcagggtatcaaaaagtctatattcagaataagagaatcacctaaagagactttcaatgcaagtttttcaggtcatatgactgatccaaactttaaaaaagaaactgaagcctctgaaagtggactggaaatacatactgtttgctcacagaaggaggactccttatgtccaaatttaattgataatggaagctggccagccaccaccacacagaattctgtagctttgaagaatgcaggtttaatatccactttgaaaaagaaaacaaataagtttatttatgctatacatgatgaaacatcttataaaggaaaaaaaataccgaaagaccaaaaatcagaactaattaactgttcagcccagtttgaagcaaatgcttttgaagcaccacttacatttgcaaatgctgattcaggtttattgcattcttctgtgaaaagaagctgttcacagaatgattctgaagaaccaactttgtccttaactagctcttttgggacaattctgaggaaatgttctagaaatgaaacatgttctaataatacagtaatctctcaggatcttgattataaagaagcaaaatgtaataaggaaaaactacagttatttattaccccagaagctgattctctgtcatgcctgcaggaaggacagtgtgaaaatgatccaaaaagcaaaaaagtttcagatataaaagaagaggtcttggctgcagcatgtcacccagtacaacattcaaaagtggaatacagtgatactgactttcaatcccagaaaagtcttttatatgatcatgaaaatgccagcactcttattttaactcctacttccaaggatgttctgtcaaacctagtcatgatttctagaggcaaagaatcatacaaaatgtcagacaagctcaaaggtaacaattatgaatctgatgttgaattaaccaaaaatattcccatggaaaagaatcaagatgtatgtgctttaaatgaaaattataaaaacgttgagctgttgccacctgaaaaatacatgagagtagcatcaccttcaagaaaggtacaattcaaccaaaacacaaatctaagagtaatccaaaaaaatcaagaagaaactacttcaatttcaaaaataactgtcaatccagactctgaagaacttttctcagacaatgagaataattttgtcttccaagtagctaatgaaaggaataatcttgctttaggaaatactaaggaacttcatgaaacagacttgacttgtgtaaacgaacccattttcaagaactctaccatggttttatatggagacacaggtgataaacaagcaacccaagtgtcaattaaaaaagatttggtttatgttcttgcagaggagaacaaaaatagtgtaaagcagcatataaaaatgactctaggtcaagatttaaaatcggacatctccttgaatatagataaaataccagaaaaaaataatgattacatgaacaaatgggcaggactcttaggtccaatttcaaatcacagttttggaggtagcttcagaacagcttcaaataaggaaatcaagctctctgaacataacattaagaagagcaaaatgttcttcaaagatattgaagaacaatatcctactagtttagcttgtgttgaaattgtaaataccttggcattagataatcaaaagaaactgagcaagcctcagtcaattaatactgtatctgcacatttacagagtagtgtagttgtttctgattgtaaaaatagtcatataacccctcagatgttattttccaagcaggattttaattcaaaccataatttaacacctagccaaaaggcagaaattacagaactttctactatattagaagaatcaggaagtcagtttgaatttactcagtttagaaaaccaagctacatattgcagaagagtacatttgaagtgcctgaaaaccagatgactatcttaaagaccacttctgaggaatgcagagatgctgatcttcatgtcataatgaatgccccatcgattggtcaggtagacagcagcaagcaatttgaaggtacagttgaaattaaacggaagtttgctggcctgttgaaaaatgactgtaacaaaagtgcttctggttatttaacagatgaaaatgaagtggggtttaggggcttttattctgctcatggcacaaaactgaatgtttctactgaagctctgcaaaaagctgtgaaactgtttagtgatattgagaatattagtgaggaaacttctgcagaggtacatccaataagtttatcttcaagtaaatgtcatgattctgttgtttcaatgtttaagatagaaaatcataatgataaaactgtaagtgaaaaaaataataaatgccaactgatattacaaaataatattgaaatgactactggcacttttgttgaagaaattactgaaaattacaagagaaatactgaaaatgaagataacaaatatactgctgccagtagaaattctcataacttagaatttgatggcagtgattcaagtaaaaatgatactgtttgtattcataaagatgaaacggacttgctatttactgatcagcacaacatatgtcttaaattatctggccagtttatgaaggagggaaacactcagattaaagaagatttgtcagatttaacttttttggaagttgcgaaagctcaagaagcatgtcatggtaatacttcaaataaagaacagttaactgctactaaaacggagcaaaatataaaagattttgagacttctgatacattttttcagactgcaagtgggaaaaatattagtgtcgccaaagagtcatttaataaaattgtaaatttctttgatcagaaaccagaagaattgcataacttttccttaaattctgaattacattctgacataagaaagaacaaaatggacattctaagttatgaggaaacagacatagttaaacacaaaatactgaaagaaagtgtcccagttggtactggaaatcaactagtgaccttccagggacaacccgaacgtgatgaaaagatcaaagaacctactctattgggttttcatacagctagcgggaaaaaagttaaaattgcaaaggaatctttggacaaagtgaaaaacctttttgatgaaaaagagcaaggtactagtgaaatcaccagttttagccatcaatgggcaaagaccctaaagtacagagaggcctgtaaagaccttgaattagcatgtgagaccattgagatcacagctgccccaaagtgtaaagaaatgcagaattctctcaataatgataaaaaccttgtttctattgagactgtggtgccacctaagctcttaagtgataatttatgtagacaaactgaaaatctcaaaacatcaaaaagtatctttttgaaagttaaagtacatgaaaatgtagaaaaagaaacagcaaaaagtcctgcaacttgttacacaaatcagtccccttattcagtcattgaaaattcagccttagctttttacacaagttgtagtagaaaaacttctgtgagtcagacttcattacttgaagcaaaaaaatggcttagagaaggaatatttgatggtcaaccagaaagaataaatactgcagattatgtaggaaattatttgtatgaaaataattcaaacagtactatagctgaaaatgacaaaaatcatctctccgaaaaacaagatacttatttaagtaacagtagcatgtctaacagctattcctaccattctgatgaggtatataatgattcaggatatctctcaaaaaataaacttgattctggtattgagccagtattgaagaatgttgaagatcaaaaaaacactagtttttccaaagtaatatccaatgtaaaagatgcaaatgcatacccacaaactgtaaatgaagatatttgcgttgaggaacttgtgactagctcttcaccctgcaaaaataaaaatgcagccattaaattgtccatatctaatagtaataattttgaggtagggccacctgcatttaggatagccagtggtaaaatcgtttgtgtttcacatgaaacaattaaaaaagtgaaagacatatttacagacagtttcagtaaagtaattaaggaaaacaacgagaataaatcaaaaatttgccaaacgaaaattatggcaggttgttacgaggcattggatgattcagaggatattcttcataactctctagataatgatgaatgtagcacgcattcacataaggtttttgctgacattcagagtgaagaaattttacaacataaccaaaatatgtctggattggagaaagtttctaaaatatcaccttgtgatgttagtttggaaacttcagatatatgtaaatgtagtatagggaagcttcataagtcagtctcatctgcaaatacttgtgggatttttagcacagcaagtggaaaatctgtccaggtatcagatgcttcattacaaaacgcaagacaagtgttttctgaaatagaagatagtaccaagcaagtcttttccaaagtattgtttaaaagtaacgaacattcagaccagctcacaagagaagaaaatactgctatacgtactccagaacatttaatatcccaaaaaggcttttcatataatgtggtaaattcatctgctttctctggatttagtacagcaagtggaaagcaagtttccattttagaaagttccttacacaaagttaagggagtgttagaggaatttgatttaatcagaactgagcatagtcttcactattcacctacgtctagacaaaatgtatcaaaaatacttcctcgtgttgataagagaaacccagagcactgtgtaaactcagaaatggaaaaaacctgcagtaaagaatttaaattatcaaataacttaaatgttgaaggtggttcttcagaaaataatcactctattaaagtttctccatatctctctcaatttcaacaagacaaacaacagttggtattaggaaccaaagtgtcacttgttgagaacattcatgttttgggaaaagaacaggcttcacctaaaaacgtaaaaatggaaattggtaaaactgaaactttttctgatgttcctgtgaaaacaaatatagaagtttgttctacttactccaaagattcagaaaactactttgaaacagaagcagtagaaattgctaaagcttttatggaagatgatgaactgacagattctaaactgccaagtcatgccacacattctctttttacatgtcccgaaaatgaggaaatggttttgtcaaattcaagaattggaaaaagaagaggagagccccttatcttagtgggagaaccctcaatcaaaagaaacttattaaatgaatttgacaggataatagaaaatcaagaaaaatccttaaaggcttcaaaaagcactccagatggcacaataaaagatcgaagattgtttatgcatcatgtttctttagagccgattacctgtgtaccctttcgcacaactaaggaacgtcaagagatacagaatccaaattttaccgcacctggtcaagaatttctgtctaaatctcatttgtatgaacatctgactttggaaaaatcttcaagcaatttagcagtttcaggacatccattttatcaagtttctgctacaagaaatgaaaaaatgagacacttgattactacaggcagaccaaccaaagtctttgttccaccttttaaaactaaatcacattttcacagagttgaacagtgtgttaggaatattaacttggaggaaaacagacaaaagcaaaacattgatggacatggctctgatgatagtaaaaataagattaatgacaatgagattcatcagtttaacaaaaacaactccaatcaagcagcagctgtaactttcacaaagtgtgaagaagaacctttagatttaattacaagtcttcagaatgccagagatatacaggatatgcgaattaagaagaaacaaaggcaacgcgtctttccacagccaggcagtctgtatcttgcaaaaacatccactctgcctcgaatctctctgaaagcagcagtaggaggccaagttccctctgcgtgttctcataaacagctgtatacgtatggcgtttctaaacattgcataaaaattaacagcaaaaatgcagagtcttttcagtttcacactgaagattattttggtaaggaaagtttatggactggaaaaggaatacagttggctgatggtggatggctcataccctccaatgatggaaaggctggaaaagaagaattttatagggctctgtgtgacactccaggtgtggatccaaagcttatttctagaatttgggtttataatcactatagatggatcatatggaaactggcagctatggaatgtgcctttcctaaggaatttgctaatagatgcctaagcccagaaagggtgcttcttcaactaaaatacagatatgatacggaaattgatagaagcagaagatcggctataaaaaagataatggaaagggatgacacagctgcaaaaacacttgttctctgtgtttctgacataatttcattgagcgcaaatatatctgaaacttctagcaataaaactagtagtgcagatacccaaaaagtggccattattgaacttacagatgggtggtatgctgttaaggcccagttagatcctcccctcttagctgtcttaaagaatggcagactgacagttggtcagaagattattcttcatggagcagaactggtgggctctcctgatgcctgtacacctcttgaagccccagaatctcttatgttaaagatttctgctaacagtactcggcctgctcgctggtataccaaacttggattctttcctgaccctagaccttttcctctgcccttatcatcgcttttcagtgatggaggaaatgttggttgtgttgatgtaattattcaaagagcataccctatacagtggatggagaagacatcatctggattatacatatttcgcaatgaaagagaggaagaaaaggaagcagcaaaatatgtggaggcccaacaaaagagactagaagccttattcactaaaattcaggaggaatttgaagaacatgaagaaaacacaacaaaaccatatttaccatcacgtgcactaacaagacagcaagttcgtgctttgcaagatggtgcagagctttatgaagcagtgaagaatgcagcagacccagcttaccttgagggttatttcagtgaagagcagttaagagccttgaataatcacaggcaaatgttgaatgataagaaacaagctcagatccagttggaaattaggaaggccatggaatctgctgaacaaaaggaacaaggtttatcaagggatgtcacaaccgtgtggaagttgcgtattgtaagctattcaaaaaaagaaaaagattcagttatactgagtatttggcgtccatcatcagatttatattctctgttaacagaaggaaagagatacagaatttatcatcttgcaacttcaaaatctaaaagtaaatctgaaagagctaacatacagttagcagcgacaaaaaaaactcagtatcaacaactaccggtttcagatgaaattttatttcagatttaccagccacgggagccccttcacttcagcaaatttttagatccagactttcagccatcttgttctgaggtggacctaataggatttgtcgtttctgttgtgaaaaaaacaggacttgcccctttcgtctatttgtcagacgaatgttacaatttactggcaataaagttttggatagaccttaatgaggacattattaagcctcatatgttaattgctgcaagcaacctccagtggcgaccagaatccaaatcaggccttcttactttatttgctggagatttttctgtgttttctgctagtccaaaagagggccactttcaagagacattcaacaaaatgaaaaatactgttgagaatattgacatactttgcaatgaagcagaaaacaagcttatgcatatactgcatgcaaatgatcccaagtggtccaccccaactaaagactgtacttcagggccgtacactgctcaaatcattcctggtacaggaaacaagcttctgatgtcttctcctaattgtgagatatattatcaaagtcctttatcactttgtatggccaaaaggaagtctgtttccacacctgtctcagcccagatgacttcaaagtcttgtaaaggggagaaagagattgatgaccaaaagaactgcaaaaagagaagagccttggatttcttgagtagactgcctttacctccacctgttagtcccatttgtacatttgtttctccggctgcacagaaggcatttcagccaccaaggagttgtggcaccaaatacgaaacacccataaagaaaaaagaactgaattctcctcagatgactccatttaaaaaattcaatgaaatttctcttttggaaagtaattcaatagctgacgaagaacttgcattgataaatacccaagctcttttgtctggttcaacaggagaaaaacaatttatatctgtcagtgaatccactaggactgctcccaccagttcagaagattatctcagactgaaacgacgttgtactacatctctgatcaaagaacaggagagttcccaggccagtacggaagaatgtgagaaaaataagcaggacacaattacaactaaaaaatatatctaagcatttgcaaaggcgacaataaattattgacgcttaacctttccagtttataagactggaatataatttcaaaccacacattagtacttatgttgcacaatgagaaaagaaattagtttcaaatttacctcagcgtttgtgtatcgggcaaaaatcgttttgcccgattccgtattggtatacttttgcttcagttgcatatcttaaaactaaatgtaatttattaactaatcaagaaaaacatctttggctgagctcggtggctcatgcctgtaatcccaacactttgagaagctgaggtgggaggagtgcttgaggccaggagttcaagaccagcctgggcaacatagggagacccccatctttacaaagaaaaaaaaaaggggaaaagaaaatcttttaaatctttggatttgatcactacaagtattattttacaagtgaaataaacataccattttcttttagattgtgtcattaaatggaatgaggtctcttagtacagttattttgatgcagataattccttttagtttagctactattttaggggattttttttagaggtaactcactatgaaatagttctccttaatgcaaatatgttggttctgctatagttccatcctgttcaaaagtcaggatgaatatgaagagtggtgtttccttttgagcaattcttcatccttaagtcagcatgattataagaaaaatagaaccctcagtgtaactctaattcctttttactattccagtgtgatctctgaaattaaattacttcaactaaaaattcaaatactttaaatcagaagatttcatagttaatttattttttttttcaacaaaatggtcatccaaactcaaacttgagaaaatatcttgctttcaaattggcactgatt

SEQ ID NO: 194 - DNA, 1500 bp, Homo sapiens
agaaccaacgaattcggagatgaagtcaggtcttccagttcagcctgcgaggaagacaggtgatccgaatcctaagaatgcaaaagatgggccgggtgtggtggctcatgcctgtaatcccagcgctttgggaggccgaggcaggcagatcacctgaggtcgggaggttgagaccagactgaccaacaacggagaaaccccgtctctacttaaaaatgcaaagttagccgtgcgtggtggcccatgcctgtattcccagctactcgggaggctgaggcaggagaaccacttgatccctggaggcggaagttgcggtgagcggagattgcgccattgcacaccagcccgggccacaagagcgaaactccgtctcaaaaaaaaaagcaaaagatactaccaagccctgcggagcaaggtacctcacacttcatgagcgagttaagatgggtttcacaatttttcaagcaaggaaacgggctcggaggtcttgaacacctgctacccaatagcagaacagctactggaactaaaatcctctgatttcaaataacagccccgcccactaccactaagtgaagtcatccacaaccacacaccgaccactctaagcttttgtaagatcggctcgctttggggaacaggtcttgagagaacatcccttttaaggtcagaacaaaggtatttcataggtcccaggtcgtgtcccgagggcgcccacccaaacatgagctggagcaaaaagaaagggatgggggacttggagtaggcataggggcggcccctccaagcagggtggcctgggactcttaagggtcagcgagaagagaacacacactccagctcccgctttattcggtcagatactgacggttgggatgcctgacaaggaatttcctttcgccacactgagaaatacccgcagcggcccacccaggcctgacttccgggtggtgcgtgtgctgcgtgtcgcgtcacggcgtcacgtggccagcgcgggcttgtggcgcgagcttctgaaactaggcggcagaggcggagccgctgtggcactgctgcgcctctgctgcgcctcgggtgtcttttgcggcggtgggtcgccgccgggagaagcgtgaggggacagatttgtgaccggcgcggtttttgtcagcttactccggccaaaaaagaactgcacctctggagcgggttagtggtggtggtagtgggttgggacgagcgcgtcttccgcagtcccagtccagcgtggcgggggagcgcctcacgccccgggtcgctgccgcggcttcttgcccttttgtctctgccaacccccacccatgcctgagagaaaggtccttgcccgaaggcagattttcgccaagcaaattcgagccccgccccttccctgggtctccatttcccgcctccggcccggcctttgggctccgccttcagctcaagacttaacttccctcccagctgtcccagatgacgccatctgaaatttcttggaaacac

SEQ ID NO: 195 - DNA, 1188 bp, Homo sapiens
acccaatagcagaacagctactggaactaaaatcctctgatttcaaataacagccccgcccactaccactaagtgaagtcatccacaaccacacaccgaccactctaagcttttgtaagatcggctcgctttggggaacaggtcttgagagaacatcccttttaaggtcagaacaaaggtatttcataggtcccaggtcgtgtcccgagggcgcccacccaaacatgagctggagcaaaaagaaagggatgggggacttggagtaggcataggggcggcccctccaagcagggtggcctgggactcttaagggtcagcgagaagagaacacacactccagctcccgctttattcggtcagatactgacggttgggatgcctgacaaggaatttcctttcgccacactgagaaatacccgcagcggcccacccaggcctgacttccgggtggtgcgtgtgctgcgtgtcgcgtcacggcgtcacgtggccagcgcgggcttgtggcgcgagcttctgaaactaggcggcagaggcggagccgctgtggcactgctgcgcctctgctgcgcctcgggtgtcttttgcggcggtgggtcgccgccgggagaagcgtgaggggacagatttgtgaccggcgcggtttttgtcagcttactccggccaaaaaagaactgcacctctggagcgggttagtggtggtggtagtgggttgggacgagcgcgtcttccgcagtcccagtccagcgtggcgggggagcgcctcacgccccgggtcgctgccgcggcttcttgcccttttgtctctgccaacccccacccatgcctgagagaaaggtccttgcccgaaggcagattttcgccaagcaaattcgagccccgccccttccctgggtctccatttcccgcctccggcccggcctttgggctccgccttcagctcaagacttaacttccctcccagctgtcccagatgacgccatctgaaatttcttggaaacacgatcactttaacggaatattgctgttttggggaagtgttttacagctgctgggcacgctgtatttgccttacttaagcccctggtaattgctgtattccgaagacatgctgatgggaattaccaggcggcgttggtctctaactggagccctctgtccccactagccacgcgtcactggttagcgtga

SEQ ID NO: 196 - DNA, 1106 bp, Homo sapiens
gacttaacttccctcccagctgtcccagatgacgccatctgaaatttcttggaaacacgatcactttaacggaatattgctgttttggggaagtgttttacagctgctgggcacgctgtatttgccttacttaagcccctggtaattgctgtattccgaagacatgctgatgggaattaccaggcggcgttggtctctaactggagccctctgtccccactagccacgcgtcactggttagcgtgattgaaactaaatcgtatgaaaatcctcttctctagtcgcactagccacgtttcgagtgcttaatgtggctagtggcaccggtttggacagcacagctgtaaaatgttcccatcctcacagtaagctgttaccgttccaggagatgggactgaattagaattcaaacaaattttccagcgcttctgagttttacctcagtcacataataaggaatgcatccctgtgtaagtgcattttggtcttctgttttgcagacttatttaccaagcattggaggaatatcgtaggtaaaaatgcctattggatccaaagagaggccaacattttttgaaatttttaagacacgctgcaacaaagcaggtattgacaaattttatataactttataaattacaccgagaaagtgttttctaaaaaatgcttgctaaaaacccagtacgtcacagtgttgcttagaaccataaactgttccttatgtgtgtataaatccagttaacaacataatcatcgtttgcaggttaaccacatgataaatatagaacgtctagtggataaagaggaaactggccccttgactagcagtaggaacaattactaacaaatcagaagcattaatgttactttatggcagaagttgtccaactttttggtttcagtactccttatactcttaaaaatgatctaggacccccggagtgcttttgtttatgtagcttaccatattagaaatttaaaactaagaatttaaggctgggcgtggtggctcacgcctgtaatcccagcactttgggaggccgaggtgggcggatcacttgaggccagaagtttgagaccagcctggccaacatggtgaaacccta

SEQ ID NO: 197 - DNA, 1249 bp, Homo sapiens
gactacaggcgtgtgccaccatgcttggctaattttttgtgtttttagtaaagatggggtttcaacgtgttagcaaggttggtctcgatctgacctcgtgatctgctcgcctcagcctcccaaagtgttgggattacaggcgtgagcccccgcacctggccgaattttatcgtggaatgtattcttaatgtgaatagtttttgattccgaaccatgaataataagaaaataaataaaatttaaatgaaaataaaagctaatatatacagcttttaataatatagttaaatgccatcttgtaacttttgtgaactcttgttacacctttctatagattcgcaagagaatggattaatgatcttgtttaattaatatgccttaacaaaagtaatccatagtcaagatcttaagcatttttttccttatgatctttaactgttctgggtcacaaatttgtctgtcactggttaaaactaaggtgggattttttttttaaatagatttaggaccaataagtcttaattggtttgaagaactttcttcagaagctccaccctataattctgaacctgcagaagaatctgaacataaaaacaacaattacgaaccaaacctatttaaaactccacaaaggaaaccatcttataatcagctggcttcaactccaataatattcaaagagcaagggctgactctgccgctgtaccaatctcctgtaaaagaattagataaattcaaattagacttaggtaagtaatgcaatatggtagactggggagaactacaaactaggaatttaggcaaacctgtgttaaaatcttagctcattcattaattgtgtcatgctgggcaaatcagtctctctggcctctttttcctcactcgaaaaatggagacgatgaaaataatgtctcataggtttggattaaattaaataatgtaggtacttagtaaatgttctctttcatccctcctttgataaatttgccaactgagatttgctgaattacgtctttcttatgccaaaaaaacctaggacttgttttgatgttaattaaactaaactatatttctgcaagctatcacagaggacagagattattttaccgatatactataagtatcatgatttggaaggagtttccctggcgtaggtgccgcatgtttctaagcaattatgtaataagattatatattcagtcattcaaataattattacctacttgacataagtaatgaactttccctt

SEQ ID NO: 198 - DNA, 1109 bp, Homo sapiens
gtcagatctggtacattggtaggttttcagtaaatgtcttcccttactccttttttctctttccttctgcttttgtttaaagcgacaagatgttgctcttttcccaggctggaatacagtggcatgatcatagctcaagctcctgggctcaagtgatcctcccgcctcagcctctcaagtagctaggactacaggcatatcaccacaccagcgttttctttgtagaggcagagtctcactctgttgctcaggcaggtgttgaactcctgcctcaagcaatcctcccacctcagcctcccagagccctcaaattataagccactgtgctcggggcatcctttttggggggtaatcagcaaactgaaaaacctcttcttacaactccctatacattctcattcccagtatagaggagactttttgtttttaaacacttccaaagaatgcaaatttataatccagagtatatacattctcactgaattattgtactgtttcaggaaggaatgttcccaatagtagacataaaagtcttcgcacagtgaaaactaaaatggatcaagcagatgatgtttcctgtccacttctaaattcttgtcttagtgaaaggtatgatgaagctattatattaaaatatttaaatgaaacattttcctacatatatttgttctataaagatgaatctgatttttatgctaatattttggctaagagcctggtagaagatcttacatttttaaataatcttttaggttgagtcctttaatagaatagtttttacattagaaacatgtaagttgttgttcttgtgatgttgaattggctggttttctgtatattctgtgattttttaagtaacaaaaataacagtggtgaaaagcagtaagtcagtccttgaattatcaatttaaaataaattgtgtacttttcatctttggagagaatatgatttactttacaaattttttttttgttttttttttttttgagatggagtctctgtcacccaggctgtagtgcagtggtgcgatctcagctcactgcaagctccgcctcccgggttcacgccattctcctgcctcagcctcccaagtagctgggactacagg

SEQ ID NO: 199 - DNA, 1050 bp, Homo sapiens
tgcgatctcagctcactgcaagctccgcctcccgggttcacgccattctcctgcctcagcctcccaagtagctgggactacaggcgcccgccaccatgcccggctaattttttgtatttttagtagagacggggtttcaccgtgttagctaggatggtctcgatttcctgacctcgtgatccgcccgcctcagcctcccagactgctgggattacaggcgtgaaccactgtgcccggcctactttacaaaatttttgagtttaaaatacacggtttccagcagctgaaatttgtgagtacatatgtgttggcattttaaacatcacttgatgattatttaatgcttcatgagagatttactttttaaaatgtaatataaaatatctaaaagtagtattccaacaatttatatgaatgagaatcttcttttaaaaataagataaactagtttttgccagttttttaaaataacctaagggatttgctttgttttattttagtcctgttgttctacaatgtacacatgtaacaccacaaagagataagtcaggtatgattaaaaacaatgctttttattcttagaatactagaaatgttaataaaaataaaacttaacaattttcccctttttttacccccagtggtatgtgggagtttgtttcatacaccaaagtttgtgaaggtaaatattctacctggtttatttttatgacttagtaattgagaatttgacaatagcgttatacctttgccctgagatttacaaatctgtacctagcattctgcctcatacaggcaattcagtaaacgttaagtgaaataaagagtgaatgaaaaaataatatccttaatgatcagggcatttctataaaaaataaactattttctttcctcccagggtcgtcagacaccaaaacatatttctgaaagtctaggagctgaggtggatcctgatatgtcttggtcaagttctttagctacaccacccacccttagttctactgtgctcataggtaataatagcaaatgtgtatttacaagaaagagcag

SEQ ID NO: 200 - DNA, 1041 bp, Homo sapiens
gtgttagctaggatggtctcgatttcctgacctcgtgatccgcccgcctcagcctcccagactgctgggattacaggcgtgaaccactgtgcccggcctactttacaaaatttttgagtttaaaatacacggtttccagcagctgaaatttgtgagtacatatgtgttggcattttaaacatcacttgatgattatttaatgcttcatgagagatttactttttaaaatgtaatataaaatatctaaaagtagtattccaacaatttatatgaatgagaatcttcttttaaaaataagataaactagtttttgccagttttttaaaataacctaagggatttgctttgttttattttagtcctgttgttctacaatgtacacatgtaacaccacaaagagataagtcaggtatgattaaaaacaatgctttttattcttagaatactagaaatgttaataaaaataaaacttaacaattttcccctttttttacccccagtggtatgtgggagtttgtttcatacaccaaagtttgtgaaggtaaatattctacctggtttatttttatgacttagtaattgagaatttgacaatagcgttatacctttgccctgagatttacaaatctgtacctagcattctgcctcatacaggcaattcagtaaacgttaagtgaaataaagagtgaatgaaaaaataatatccttaatgatcagggcatttctataaaaaataaactattttctttcctcccagggtcgtcagacaccaaaacatatttctgaaagtctaggagctgaggtggatcctgatatgtcttggtcaagttctttagctacaccacccacccttagttctactgtgctcataggtaataatagcaaatgtgtatttacaagaaagagcagatgaggttgataattgtcatctctaatacttctgttaaaaggaaatatgaaaagaaaatattagataatgtctttgataagtgtgttagtaactgacaataattttattctattaagtgtagattggaataa

SEQ ID NO: 201 - DNA, 1115 bp, Homo sapiens
ccaacaatttatatgaatgagaatcttcttttaaaaataagataaactagtttttgccagttttttaaaataacctaagggatttgctttgttttattttagtcctgttgttctacaatgtacacatgtaacaccacaaagagataagtcaggtatgattaaaaacaatgctttttattcttagaatactagaaatgttaataaaaataaaacttaacaattttcccctttttttacccccagtggtatgtgggagtttgtttcatacaccaaagtttgtgaaggtaaatattctacctggtttatttttatgacttagtaattgagaatttgacaatagcgttatacctttgccctgagatttacaaatctgtacctagcattctgcctcatacaggcaattcagtaaacgttaagtgaaataaagagtgaatgaaaaaataatatccttaatgatcagggcatttctataaaaaataaactattttctttcctcccagggtcgtcagacaccaaaacatatttctgaaagtctaggagctgaggtggatcctgatatgtcttggtcaagttctttagctacaccacccacccttagttctactgtgctcataggtaataatagcaaatgtgtatttacaagaaagagcagatgaggttgataattgtcatctctaatacttctgttaaaaggaaatatgaaaagaaaatattagataatgtctttgataagtgtgttagtaactgacaataattttattctattaagtgtagattggaataaatacaaatacatttagtggtagtccagtggtgtcaagcattatgttttagtacgatgtgattaacgtagaatagcttacaaatattcctttactggcctatataagcgtttaagaggcagtatttggtgtgactgaattctttttacaaatgattgtggtaattggggcattaaagcagcattaaataagcttttgttttctctacttaaatgtgttctaaggtctgtattgccagtagtactgaattgaggtcttaaattccacaagtgtaattacacaactatgtgataaactgcaatatttatccattcattaaactgtaaactcttt

SEQ ID NO: 202 - DNA, 1050 bp, Homo sapiens
accagtattacattttgtttattctagcaaaatagcattctgttttgattcctctttagctgggagtaagttaaccctattctgttgcttagatgaaataatatggataaaatcattttgaaaatatgtatttaatatatagtatgcctttaggctgtagtgttgtctaaatgaatgctaaagtctccaagctttagcttttaagtcataacctcacagcatcatctgactttccaactcattgtggacagtattaccataaagtaatgatcaccaagccatatcttaccaccttgtgagtagtactaaggaagtaagtatagtttattcactgtgttgattgacctttctaattactatacttaagtacttgaatcaattcattttgtttcaaatgtgtcatgtaatcaaatagtagatgtgctttttgatgtctgacaaaaaataagtttttgcattctagtgataatatacaatacacataaatttttatcttacagtcagaaatgaagaagcatctgaaactgtatttcctcatgatactactgctgtaagtaaatatgacattgattagactgttgaaattgctaacaattttggaatgccttgttaaattatttatcttacatttttaatttcctaatctgtaatttatctaagcctttgagaaagtctctaaacctggtcctatatgtgattttaacttcctgtgaaactctgctgtctctctgttaaagttgcatatatacaatatataccgtagtcccctattcatggggtatacattccaatatcccccagtgaatgcttgaaaccttagatagtaccgaaccctatatatatatattaaaaatgtgtagtatttatatatatatacctataatctttttttctataagcacataccctgtgataaagtttaattcataaattaggcacagtaagagattaacaagaactaataataaaataggacaattataacaaaataccgtaataaaagttatgtgaatgttgtctctctgtctcaaaatatcttattgttctgta

SEQ ID NO: 203 - DNA, 1112 bp, Homo sapiens
gcactttatggcttctttttggcatatttgaattgccagcatcattatacttgtgctttggggccattgttaagtaaaataagggtgacttgaacacaagcactgtggtaccacaatagccgatctgataaccaagacaactactaagtgactaataggtgggtaccatatacagcctggatacgctggacaaagggatgattcatgtcccaagtgggatggagcaagatggtgcaagtttttttttctccatttccattttcctttcctaagatttccacatcctagtggtgcaagatttcatcacactactcaggatgacacacaatttaaaacttactaattgcttacttctggaattttccattaaaaatttttggacctaggttgattgcagataactgaaatcaccaaaagtgaaaccatggataaggggggactactactatatgtgcattgagagtttttatactagtgattttaaactataatttttgcagaatgtgaaaagctatttttccaatcatgatgaaagtctgaagaaaaatgatagatttatcgcttctgtgacagacagtgaaaacacaaatcaaagagaagctgcaagtcatggtaagtcctctgtttagttgaactacaggtttttttgttgttgttgttttgattttttttttttgaggtggagtcttgctctgtcacccgtgatctcggtttaccgcaacctctgcctcccgtgctcaagcgatcctgcctcagcttgccaagtagctgagattacaagcatgcaccaccatgcccaactattgtatttttagtagagatggcatttcaccatgttggccaggctggtctcaaatggtcgtgagccaccatgcccagcctgaactactctttttaattggcaccattgaaggattgctcctcttttcttaaagagaaaatatattacctttcctttcttgactactgaagtagtattttatctcaaagtattgagagtagaaactaacttggtgtgcctgtgatcccagctactcaggaggctgaggtgggaggatcgcttaagcccaggcggtcaaggttgcagtgagctgtgtgtgtgccactgcact

SEQ ID NO: 204 - DNA, 2116 bp, Homo sapiens
aggtcatggaatattgcatttttcttagtatgtgtgtatgtctgtataactgtgtaggatttgatatctgtttttgtctgtgtggtatcatgtacgtatgtatatgcatatgtaaaatcagatttacccttgttatagggccacagaattgatttggaacatctgttttgataggtcttagaatatttaattgtatatatagtaagattaggtgagttttaattgtgtagaactgctaaagaaaggtttttagggattgttgtatgaataaaaggctttaggttcattggaatcaggggaatcaggctttactagaagaacaggagaaggggtgactgaccgaaaaataaaatgccaagtactcagaataaccctttaaatactgatatgtaatatttagcacattctacataaactgtttctatgagaaaggttgtgagaataatataaattatatggcttataaaatattaatgtgcttctgttttatactttaacaggatttggaaaaacatcagggaattcatttaaagtaaatagctgcaaagaccacattggaaagtcaatgccaaatgtcctagaagatgaagtatatgaaacagttgtagatacctctgaagaagatagtttttcattatgtttttctaaatgtagaacaaaaaatctacaaaaagtaagaactagcaagactaggaaaaaaattttccatgaagcaaacgctgatgaatgtgaaaaatctaaaaaccaagtgaaagaaaaatactcatttgtatctgaagtggaaccaaatgatactgatccattagattcaaatgtagcaaatcagaagccctttgagagtggaagtgacaaaatctccaaggaagttgtaccgtctttggcctgtgaatggtctcaactaaccctttcaggtctaaatggagcccagatggagaaaatacccctattgcatatttcttcatgtgaccaaaatatttcagaaaaagacctattagacacagagaacaaaagaaagaaagattttcttacttcagagaattctttgccacgtatttctagcctaccaaaatcagagaagccattaaatgaggaaacagtggtaaataagagagatgaagagcagcatcttgaatctcatacagactgcattcttgcagtaaagcaggcaatatctggaacttctccagtggcttcttcatttcagggtatcaaaaagtctatattcagaataagagaatcacctaaagagactttcaatgcaagtttttcaggtcatatgactgatccaaactttaaaaaagaaactgaagcctctgaaagtggactggaaatacatactgtttgctcacagaaggaggactccttatgtccaaatttaattgataatggaagctggccagccaccaccacacagaattctgtagctttgaagaatgcaggtttaatatccactttgaaaaagaaaacaaataagtttatttatgctatacatgatgaaacatcttataaaggaaaaaaaataccgaaagaccaaaaatcagaactaattaactgttcagcccagtttgaagcaaatgcttttgaagcaccacttacatttgcaaatgctgattcaggtacctctgtctttttttttttgtaaatagtacatatagttttatagatgacgattccttctgtgtttttttctgctttttaaaatcttcatatcttatatttaatcttaggcatcatctgtatacatgattgtttaggtctttaattaccagtgtttagaatcaggtcactcaaacatggtagataagtttgcatagtttgtgtatatccatcactcttgagacagttttattttaagttccggggtacatgtgcaggatgtgcaggtttgttacataagtaaacgtatgccatgttggtttgctgcacctgtcaacccttcacctgagtattaagcccagcatgcattagctatttttcctggtgctctccttccccccacacacccccacctcctgacagaccctagtgtgtgttgttcccctccctgtgtccgtgtgttctcattgttcagctcccacttatgagtgagaacatgtgatgtttagttttctgttcc

SEQ ID NO: 205 - DNA, 5932 bp, Homo sapiens
tgagctaaaaaatgtaataactgaaaaatagagcatatttaggattctttctgctttaaatttgacattcagttattttcatgtaatttgtgttttgagcactaccttttaattaatttatttatttttattttttagagactgtctcattctgttacctagtctggagtgcactagtgtgatctcagctcaccgtagcctcaccctcctgggctcaagcagtccttgcacctcaccctcctgagtaactggcaccacaggcatacaccaccacacccagctaatttttatttttcatagagtcatggtctcactatgttgcccaggctagtctcgaactcctgggctcaagcagtcttcctgcctcagcctcccaaaagtgctgagattacaggcatgagccactgtgcccaaacactacctttttaacttagtgaaaaatatttagtgaatgtgattgatggtactttaattttgtcactttgtgtttttatgtttaggtttattgcattcttctgtgaaaagaagctgttcacagaatgattctgaagaaccaactttgtccttaactagctcttttgggacaattctgaggaaatgttctagaaatgaaacatgttctaataatacagtaatctctcaggatcttgattataaagaagcaaaatgtaataaggaaaaactacagttatttattaccccagaagctgattctctgtcatgcctgcaggaaggacagtgtgaaaatgatccaaaaagcaaaaaagtttcagatataaaagaagaggtcttggctgcagcatgtcacccagtacaacattcaaaagtggaatacagtgatactgactttcaatcccagaaaagtcttttatatgatcatgaaaatgccagcactcttattttaactcctacttccaaggatgttctgtcaaacctagtcatgatttctagaggcaaagaatcatacaaaatgtcagacaagctcaaaggtaacaattatgaatctgatgttgaattaaccaaaaatattcccatggaaaagaatcaagatgtatgtgctttaaatgaaaattataaaaacgttgagctgttgccacctgaaaaatacatgagagtagcatcaccttcaagaaaggtacaattcaaccaaaacacaaatctaagagtaatccaaaaaaatcaagaagaaactacttcaatttcaaaaataactgtcaatccagactctgaagaacttttctcagacaatgagaataattttgtcttccaagtagctaatgaaaggaataatcttgctttaggaaatactaaggaacttcatgaaacagacttgacttgtgtaaacgaacccattttcaagaactctaccatggttttatatggagacacaggtgataaacaagcaacccaagtgtcaattaaaaaagatttggtttatgttcttgcagaggagaacaaaaatagtgtaaagcagcatataaaaatgactctaggtcaagatttaaaatcggacatctccttgaatatagataaaataccagaaaaaaataatgattacatgaacaaatgggcaggactcttaggtccaatttcaaatcacagttttggaggtagcttcagaacagcttcaaataaggaaatcaagctctctgaacataacattaagaagagcaaaatgttcttcaaagatattgaagaacaatatcctactagtttagcttgtgttgaaattgtaaataccttggcattagataatcaaaagaaactgagcaagcctcagtcaattaatactgtatctgcacatttacagagtagtgtagttgtttctgattgtaaaaatagtcatataacccctcagatgttattttccaagcaggattttaattcaaaccataatttaacacctagccaaaaggcagaaattacagaactttctactatattagaagaatcaggaagtcagtttgaatttactcagtttagaaaaccaagctacatattgcagaagagtacatttgaagtgcctgaaaaccagatgactatcttaaagaccacttctgaggaatgcagagatgctgatcttcatgtcataatgaatgccccatcgattggtcaggtagacagcagcaagcaatttgaaggtacagttgaaattaaacggaagtttgctggcctgttgaaaaatgactgtaacaaaagtgcttctggttatttaacagatgaaaatgaagtggggtttaggggcttttattctgctcatggcacaaaactgaatgtttctactgaagctctgcaaaaagctgtgaaactgtttagtgatattgagaatattagtgaggaaacttctgcagaggtacatccaataagtttatcttcaagtaaatgtcatgattctgttgtttcaatgtttaagatagaaaatcataatgataaaactgtaagtgaaaaaaataataaatgccaactgatattacaaaataatattgaaatgactactggcacttttgttgaagaaattactgaaaattacaagagaaatactgaaaatgaagataacaaatatactgctgccagtagaaattctcataacttagaatttgatggcagtgattcaagtaaaaatgatactgtttgtattcataaagatgaaacggacttgctatttactgatcagcacaacatatgtcttaaattatctggccagtttatgaaggagggaaacactcagattaaagaagatttgtcagatttaacttttttggaagttgcgaaagctcaagaagcatgtcatggtaatacttcaaataaagaacagttaactgctactaaaacggagcaaaatataaaagattttgagacttctgatacattttttcagactgcaagtgggaaaaatattagtgtcgccaaagagtcatttaataaaattgtaaatttctttgatcagaaaccagaagaattgcataacttttccttaaattctgaattacattctgacataagaaagaacaaaatggacattctaagttatgaggaaacagacatagttaaacacaaaatactgaaagaaagtgtcccagttggtactggaaatcaactagtgaccttccagggacaacccgaacgtgatgaaaagatcaaagaacctactctattgggttttcatacagctagcgggaaaaaagttaaaattgcaaaggaatctttggacaaagtgaaaaacctttttgatgaaaaagagcaaggtactagtgaaatcaccagttttagccatcaatgggcaaagaccctaaagtacagagaggcctgtaaagaccttgaattagcatgtgagaccattgagatcacagctgccccaaagtgtaaagaaatgcagaattctctcaataatgataaaaaccttgtttctattgagactgtggtgccacctaagctcttaagtgataatttatgtagacaaactgaaaatctcaaaacatcaaaaagtatctttttgaaagttaaagtacatgaaaatgtagaaaaagaaacagcaaaaagtcctgcaacttgttacacaaatcagtccccttattcagtcattgaaaattcagccttagctttttacacaagttgtagtagaaaaacttctgtgagtcagacttcattacttgaagcaaaaaaatggcttagagaaggaatatttgatggtcaaccagaaagaataaatactgcagattatgtaggaaattatttgtatgaaaataattcaaacagtactatagctgaaaatgacaaaaatcatctctccgaaaaacaagatacttatttaagtaacagtagcatgtctaacagctattcctaccattctgatgaggtatataatgattcaggatatctctcaaaaaataaacttgattctggtattgagccagtattgaagaatgttgaagatcaaaaaaacactagtttttccaaagtaatatccaatgtaaaagatgcaaatgcatacccacaaactgtaaatgaagatatttgcgttgaggaacttgtgactagctcttcaccctgcaaaaataaaaatgcagccattaaattgtccatatctaatagtaataattttgaggtagggccacctgcatttaggatagccagtggtaaaatcgtttgtgtttcacatgaaacaattaaaaaagtgaaagacatatttacagacagtttcagtaaagtaattaaggaaaacaacgagaataaatcaaaaatttgccaaacgaaaattatggcaggttgttacgaggcattggatgattcagaggatattcttcataactctctagataatgatgaatgtagcacgcattcacataaggtttttgctgacattcagagtgaagaaattttacaacataaccaaaatatgtctggattggagaaagtttctaaaatatcaccttgtgatgttagtttggaaacttcagatatatgtaaatgtagtatagggaagcttcataagtcagtctcatctgcaaatacttgtgggatttttagcacagcaagtggaaaatctgtccaggtatcagatgcttcattacaaaacgcaagacaagtgttttctgaaatagaagatagtaccaagcaagtcttttccaaagtattgtttaaaagtaacgaacattcagaccagctcacaagagaagaaaatactgctatacgtactccagaacatttaatatcccaaaaaggcttttcatataatgtggtaaattcatctgctttctctggatttagtacagcaagtggaaagcaagtttccattttagaaagttccttacacaaagttaagggagtgttagaggaatttgatttaatcagaactgagcatagtcttcactattcacctacgtctagacaaaatgtatcaaaaatacttcctcgtgttgataagagaaacccagagcactgtgtaaactcagaaatggaaaaaacctgcagtaaagaatttaaattatcaaataacttaaatgttgaaggtggttcttcagaaaataatcactctattaaagtttctccatatctctctcaatttcaacaagacaaacaacagttggtattaggaaccaaagtgtcacttgttgagaacattcatgttttgggaaaagaacaggcttcacctaaaaacgtaaaaatggaaattggtaaaactgaaactttttctgatgttcctgtgaaaacaaatatagaagtttgttctacttactccaaagattcagaaaactactttgaaacagaagcagtagaaattgctaaagcttttatggaagatgatgaactgacagattctaaactgccaagtcatgccacacattctctttttacatgtcccgaaaatgaggaaatggttttgtcaaattcaagaattggaaaaagaagaggagagccccttatcttagtgggtaagtgttcatttttacctttcgtgttgccaatcactatttttaaagtgtttattcagtagacttggtatgctaacaattaagagtgttataaactatgtcttttcagccatttttgtgtagtcagtttgggggagtatggtttgatatacagatacacagattcagtattcgtatacagatttgatatcttggtatacagattcgatatctctgaatctgtataccaagaaatcatgttttaagggtctcaatatattttcaaaaagattattagtataataattgagaaattactgttaaaaagttttgagtttctctagaaaatttgaaactcttaacaaaacctgcataatactaacttaactgttttcatatacatagcaagttcagactctgacttatatgaactttaaaagttggtttccgggaggccgaggcgggcggatcacgaggtcaggagatcgagaccatcccggctaaaacggtgaaaccccgtc

SEQ ID NO: 206 - DNA, 1096 bp, Homo sapiens
ctattactagtactttaatgtaatttgataattgtaaaaagcctcttaactctaattcaaggacctacataataaattactccttcagttaatggctgcccccgtgctgaaaaaaaaaaaaaaaaagagagaaaaagtttatttgaagaaattttgttaggccttattgccagtaaacctagagttatatttagtgtcagtttttcaaaaagtagcttatctgtggtatctggtagcatctgtttatcctatttaggatttatcctgtttagaccctgttaaatagtggtgttttaaagtggtcaaaacagaacaaaaatgtaattgacattgaagactgactttactctttcaaacattaggtcactatttgttgtaagtatttttgtttaacatttaaagagtcaatactttagctttaaaaaaatggtctatagacttttgagaaataaaactgatattatttgccttaaaaacatatatgaaatatttctttttaggagaaccctcaatcaaaagaaacttattaaatgaatttgacaggataatagaaaatcaagaaaaatccttaaaggcttcaaaaagcactccagatggtaaaattagctttttatttatatctgttctccctctataggtatggtatataatattctgacctcaggtgatccacctgcctctcaaagtgctgggattacagacatgagccactgtgcctaatcaaggacctctttatactcttaaaaattactgaggacctaaaagagcatttgtttatgtggaatatatctattgatatttaccatattagaaatgtaaattgattaatgttaaaattagtaatattatgcgttggtcatttggaagatatgagttcactgagttatgcggatcttccgaaagttgacagttttattatgcagtattaaacaatcactttcattgatgccattaccgatcagaaaagtttaagtagtagaaagctgtcaagcttacagagccagatacaagcttcccaaaaattctgattttcatctaaaagcttgaatttttccccggcaataagtattgtcacttatttttcttgtaggtgaca

SEQ ID NO: 207 - DNA, 1070 bp, Homo sapiens
gactccttaatgagtatatagagatcgtcctcattcttttttgtggttacatagtagttgatcatctggctgtgtcagtgtttcctagtttatttaaccaatttccaactagtggacttattgaagatttaattaggttccagttacatactgagaatgaacaatatctaaagcttagcttttaaaccttcataagactaaattttaaatttggtatttgcatcagaaattagctaacacctttgagttatgatggttaacatcaactgactaaatttatgctgatttctgttgtatgcttgtactgtgagttatttggtgcatagtcattatcaatttgtgaatcaatttattttcatagttaacatttattgagcatctgttacattcactgaaaattgtaaagcctataattgtctcaaattttttgtgtatttacagtaacatggatattctcttagattttaactaatatgtaatataaaataattgtttcctaggcacaataaaagatcgaagattgtttatgcatcatgtttctttagagccgattacctgtgtaccctttcggtaagacatgtttaaatttttctaaattctaatacagtatgagaaaagtctcgtttttataaatgaacatttctaaaaataatgacactaacgttaagaagttaacacttcccgttttataaaatttataaaatactttggtagtattttatagtgctgttcatatcattattttattttttaattttatgacagctttgtaaagtagacagattttattctaattttatggatgaagtactaaggttgagaggaattaaggaaattgctccgaatcagttaacaaaaagattgcagatattaaaaatatccttttatctctcctctctaaacctttaaaaaagtactaagatagtttttttaatgtataattcccaaggacaatgatgagaagaaacaacaaaagtttggaagccaaaaacataaaggatttagtaagcatgagaaagctaaaacctgacactagagcaaacagagatgctttcccctaaaaaacctga

SEQ ID NO: 208 - DNA, 1428 bp, Homo sapiens
gtgagtgagaaaataagagtttcaaaggtaggcaagatttttgggctaaataaaaagggcactttaaaaaaggtataaataggtagaagagagaaaagggagcgaggtgggataattgaaagaggggatctcctgtggagactgaggtattaggcggagtagagagttcaggtgaagatgtgaaggtgagagaagaggatgggtagacatttccctggtgaaggaggtaaggagtactatgatggaattagaggggacacactgagagggtccacacttgacagactctcttctattatgtgttatgtgaggtagattgtaaagtcaaaggctagccttgaaaaatgtgatattgttttggaatggcaaccatggtgaatacaaaacagttaccagaatagtatcaccatgtagcaaatgagggtctgcaacaaaggcatattcctaaatatttatatgtgtactagtcaataaacttatatattttctccccattgcagcacaactaaggaacgtcaagagatacagaatccaaattttaccgcacctggtcaagaatttctgtctaaatctcatttgtatgaacatctgactttggaaaaatcttcaagcaatttagcagtttcaggacatccattttatcaagtttctgctacaagaaatgaaaaaatgagacacttgattactacaggcagaccaaccaaagtctttgttccaccttttaaaactaaatcacattttcacagagttgaacagtgtgttaggaatattaacttggaggaaaacagacaaaagcaaaacattgatggacatggctctgatgatagtaaaaataagattaatgacaatgagattcatcagtttaacaaaaacaactccaatcaagcagtagctgtaactttcacaaagtgtgaagaagaacctttaggtattgtatgacaatttgtgtgatgaatttttgcctttcagttagatatttccgttgttaaataatgtcctgatggttttccccctttggtggtggtaattttaaagccctttttaatgttttagattttctaaatccaaagattaggtttaaattattctaatgtttctttcaaagataacttcttgtggacttgttaaaaaaaattagacacacaatctaggactgctgttactggaatatattttctatcatgctactaattttctttttaaaatgtgataaaaatagggccgggcgtggtggctcatgcctgtaatcccagaactttgggagactaaggcgggcggatcacctgaggtcaggagttcaagaccagcctggccaacatagtgaaaccctgtctctactaaaaatacaaaataaataaataaataaataaatagctgagcgtggtggcaggcacctgtaatcccagctgcttgggaggctgaggcagg

SEQ ID NO: 209 - DNA, 1182 bp, Homo sapiens
acaagttgaaacatcctttcatttatgaagaattaaaaggggtaccctttttagagaaaaggagagcatgtaaacttcgaggaaattgatatgtataattttataaaacagggcttgcgcttttttttttttgagacagagtttcgctcttgttgcccaggctggagtgcaatggtgcaacctcggctcaccgcaacctcctcctcccgagttcaagtgattctcctgcctcagcctgctgaatagctgggattacaggcatgtgccaccacacctggctacttttgtgttttttttacttttatatattttttttttgtttagtagagacagggtttctccattttggtcaggctggtcttgaactcccgacctcagatgatctgcccgcctcagcctcccaaagtgctgggattacaggcgtgagccactgtgcctggccaggggttgtgctttttaaatttcaattttatttttgctaagtatttattctttgatagatttaattacaagtcttcagaatgccagagatatacaggatatgcgaattaagaagaaacaaaggcaacgcgtctttccacagccaggcagtctgtatcttgcaaaaacatccactctgcctcgaatctctctgaaagcagcagtaggaggccaagttccctctgcgtgttctcataaacaggtatgtgtttgtctacaatactgatggcttttatgacagagtgtaattttatttcattaactagtatctacaaatggctttgtttaaagaatgaacacattagtgcaggaatggatgaatgaaatcatcatattttctaattagcctgcagtggcagcctctggccccttgctaggcctgcctcatcctgctaaagtgatctgtgcttccaaattactacttcttttcccccttcaaatctttcttattttgtcattgtaaatgctctcagctaggtgttaaagtagtcttactgatattcaaatgtgaataactgatagccctgaaccttctatgagctatttatattttccaaagaggattctccttaagccaatattatctaggtagaattttaggcaatggagaggtgaaaataatattgatgacattaatagctaactttgagcattttctaggtgtaagatgctcttctaagcacttcacatgcattaggtata

SEQ ID NO: 210 - DNA, 1188 bp, Homo sapiens
ctatgattccaaagcaaagagtctgactccagagtcaaactctgaacaaacaaaaagacactttgggttagatatcctggggtgaaagcaagcactttgaaagtaagccaagcctgtgtacagatctgaccacctgaggtcacattccctaaaatacttaaacttctcccttttgtttcccatctaagtttttgaacttaagagattttgtaaaacatcacatttttttatcctcacagtaccttcctatggcagatttagcaggaggcgtataaacggggtggaaaaggtacagcagactgtggaatgtatggatcatttatattacattaaaatttttagtttctagtaaataacttaaatgtttttgtagtgaagattctagtagttaatgaaaatttttggtaaattcagttttggtttgttataattgtttttattgtgtgatacatgtttactttaaattgtttttcttttttgtgtgtgtttattttgtgtagctgtatacgtatggcgtttctaaacattgcataaaaattaacagcaaaaatgcagagtcttttcagtttcacactgaagattattttggtaaggaaagtttatggactggaaaaggaatacagttggctgatggtggatggctcataccctccaatgatggaaaggctggaaaagaagaattttataggtactctatgcaaaaagattgtgtgttaacttttatgtattccctcatccctctttcttctcttaactgtctctcgaactaaaaagttggctagaaatcaaatttttatgcatttaattgttttaagtgcattatggttaagcattctgtagaagtcttttgaaaagtgctgtttgtcctggggtttaatgaactggattttcttgatttgggacatttttcttaggcatttataaatatagcccaatttataaagttaaatttggccgggtacagtggctcatgcctgtaatcccagcactttgggaggccgaggcgggtagatcacctgaggtcaggagttcgagaccagcctggccaacgtggcgaaaccccatctctactaaaagtacaagaactatctgggcgtggtggcaggcacctgtaatcccggctactctggaggctgaggcaggagaatcgcttgaacctgggaggcagaggttgcagtgagccaagat

SEQ ID NO: 211 - DNA, 1171 bp, Homo sapiens
ttgttttgtttttatattttgagatagggtctcactcttgtccaggctggagtgcagtggcactatcatggctcactgcagcctcaacctcctgggctcaagcaatcctcccaccacagcctcctaagtagctgggaccacagatgtgagctaccactcttggctgattttttttattattttttgtagagatgtgggggtctcactatgttgcctaggctggtctcaaacttctggcctcaagcaatcctcctgcctcagcttcccaaaatgctgggagtataggcatgagccaccatgctcagcaatgaagtttttatcagtatgatactttgatacatgtcaaataattttctgaaattatattgtagatcatatgaactcataaaaacttaatgatcttgaacaatgtagtttttgtacagagaatagttgtagttgttgaattcagtatcatcctatgtggtttttatgataatattctacttttatttgttcagggctctgtgtgacactccaggtgtggatccaaagcttatttctagaatttgggtttataatcactatagatggatcatatggaaactggcagctatggaatgtgcctttcctaaggaatttgctaatagatgcctaagcccagaaagggtgcttcttcaactaaaatacaggcaagtttaaagcattacattacgtaatcatatacggcagtatggttaaggtttctgtgtagtctgtgacttccatgtcaaaatgttgcacaagccagttgtcagtgacagttgccatcccacactgctgttctcctgtcatccctagcccccatttaagagagatcacacattcatgcattgcttgcttccctctttccccaccccctccttaacctcttgatgtatgagaagaatatgagttactaatttgatccactatttggggattgctaataaagcatttttgcattttattttttgctttttaaaaataattgatattttaacaatatgaaacaatatattcctagctacaaaatttttaattctcagtatttcttagataaattcagtttttattctcagttattcagtgacttgtttaaacagtggaattctagagtcacacttcctaaaatatgcatttttgttttcacttttagatatgatacggaaat

SEQ ID NO: 212 - DNA, 1355 bp, Homo sapiens
tcaactaaaatacaggcaagtttaaagcattacattacgtaatcatatacggcagtatggttaaggtttctgtgtagtctgtgacttccatgtcaaaatgttgcacaagccagttgtcagtgacagttgccatcccacactgctgttctcctgtcatccctagcccccatttaagagagatcacacattcatgcattgcttgcttccctctttccccaccccctccttaacctcttgatgtatgagaagaatatgagttactaatttgatccactatttggggattgctaataaagcatttttgcattttattttttgctttttaaaaataattgatattttaacaatatgaaacaatatattcctagctacaaaatttttaattctcagtatttcttagataaattcagtttttattctcagttattcagtgacttgtttaaacagtggaattctagagtcacacttcctaaaatatgcatttttgttttcacttttagatatgatacggaaattgatagaagcagaagatcggctataaaaaagataatggaaagggatgacacagctgcaaaaacacttgttctctgtgtttctgacataatttcattgagcgcaaatatatctgaaacttctagcaataaaactagtagtgcagatacccaaaaagtggccattattgaacttacagatgggtggtatgctgttaaggcccagttagatcctcccctcttagctgtcttaaagaatggcagactgacagttggtcagaagattattcttcatggagcagaactggtgggctctcctgatgcctgtacacctcttgaagccccagaatctcttatgttaaaggtaaattaatttgcactcttggtaaaaatcagtcattgattcagttaaattctagaagttttacatttaaattttaaatgcttactaaggatgctcaatttcttagatgtactgataattttagtataaaaagcatattcttcagacagttaaagtttttgtgcagtttttgggaggtccagagatctttcttgagcttaaataatgcatttccaattaaaaagcaaaataaatttgcaccatttgattttggtatctgtagcttgctgccctcttgttctcatagctttgctttgatcagatccctattccactctggattagagaattacattttagtacttttcaaatatgtaatagatacactttttatctctatgtagattttaaactacataacaggactctttgtcatattgaatggtctgcagtattgctatctgaaattaccgataatattgtacattcagattcacttaagaggtaaccttgcagagaat

SEQ ID NO: 213 - DNA, 1156 bp, Homo sapiens
gcttaacaccatgccaggtaccttagtaagtgttcgatgaatatttgctttttgtattagccataatcattctcaggctgctttgtcatttacttgttccacaaattcttagcttccaaaattttggtgatacctcatttcctattctctctagttgcctttgtccatgtagattttttgaggaagcttgggtaaataagtgtattttaaactattatgtttaaatcgaagttccttttatctgttttctaatagaaacatttaaatagcattaagaacttgtagcagtataaacaatatgtttgagaagtactatattgtgaaaatattttcacttttatacagttttttacttatttactgtcttactaatcttcctaagactttttaaagtgaatatttttaaggcagttctagaagaatgaaaactcttatgatatctgtaatagaattgaatacatatttaactactaaatcaatatatttattaatttgtccagatttctgctaacagtactcggcctgctcgctggtataccaaacttggattctttcctgaccctagaccttttcctctgcccttatcatcgcttttcagtgatggaggaaatgttggttgtgttgatgtaattattcaaagagcataccctatacaggtatgatgtattcttgaaacttaccatatatttctttcttttgatacaattaatttgtttgtttgtttgagatggagtttcggtctcttgcccaggctggagtgcaatggcgtgatcttggttcactgcagcctccacctcccgggttcaagtgattctcctgcctcagcctctcaagtagctgagccaccacacctggctaattttgtatttttggtagagaaggggtttcatcatgttggtcaggctgatctcgaactcctgacctcaggtgatccactaatctcagcctcccaaagttctgggattacagatgtgagccactgtgcctggcctgatacaattaacttgaatgttatatatgtgacttttttggtgtgtgtaacacattattacagtggatggagaagacatcatctggattatacatatttcgcaatgaaagagaggaagaaaaggaagcagcaaaatatgtggaggcccaacaaaagagactagaa

SEQ ID NO: 214 - DNA, 1145 bp, Homo sapiens
cctgaccctagaccttttcctctgcccttatcatcgcttttcagtgatggaggaaatgttggttgtgttgatgtaattattcaaagagcataccctatacaggtatgatgtattcttgaaacttaccatatatttctttcttttgatacaattaatttgtttgtttgtttgagatggagtttcggtctcttgcccaggctggagtgcaatggcgtgatcttggttcactgcagcctccacctcccgggttcaagtgattctcctgcctcagcctctcaagtagctgagccaccacacctggctaattttgtatttttggtagagaaggggtttcatcatgttggtcaggctgatctcgaactcctgacctcaggtgatccactaatctcagcctcccaaagttctgggattacagatgtgagccactgtgcctggcctgatacaattaacttgaatgttatatatgtgacttttttggtgtgtgtaacacattattacagtggatggagaagacatcatctggattatacatatttcgcaatgaaagagaggaagaaaaggaagcagcaaaatatgtggaggcccaacaaaagagactagaagccttattcactaaaattcaggaggaatttgaagaacatgaaggtaaaattagttatatggtacacattgttatttctaatatgagaacaaagtcttagagactttgaatttaacatttttaatgagtaaattgtttttattttgagtagtaaattgactttattttttagtatctagggtattcttttttggtgttagacaaagaatagcaacaagggacagaaatatcaggtctaagccatttgtaatatttttcctgaattcttacctatatgatgtggcttttgcatttttgtcatggtagttattagctttcatgtgttattatgcctggaactaggacctattgtggtgtcaattttaatattaaaaatcatggtgttttgatgtttatatgacataaattttattttttcgtatctcccttttgttgttgctgaagattttatgtttttctgcatttcctcatgatttatatagatgtaacatgttctataggacatgtaatttacatgtcctatagaactataagttacatgtcc

SEQ ID NO: 215 - DNA, 1122 bp, Homo sapiens
actctgtatgactttttttttttttaaacatgagtacactggtttcaaaatttcctggaaaacttatagcaggccaggtgtcatgggtcacatctgtaatcccaacagtttgggagtccaaggtggtggatcacttgaggtcaggagtttgagaccagcctggccaatatggtgaaactccgtctctaccaaaaatgcaaaaattaaccgggcatgttggatgtgcctctaatcccagctactcgggaggctgaggcaggagaaccacttgaacccaggagacagaggttgcaatgagccgagatcacaccactgcactcccagattgggtgacagagtgagaccctgtctcaaaaaaaaaaaaaagaaaaaacttttagcagttatatagtttcttatctttaaatctcccttctttgggtgttttatgcttggttctttagttttagttgcttttgaatttacagtttagtgaattaataatccttttgttttcttagaaaacacaacaaaaccatatttaccatcacgtgcactaacaagacagcaagttcgtgctttgcaagatggtgcagagctttatgaagcagtgaagaatgcagcagacccagcttaccttgaggtgagagagtaagaggacatataatgaggcttgatgattattcaaggtgagaagctgttttagactctctggccatcacaggaaggagtatgttgaaatgctgcatttctcaaaagggatgtgtacatttctgggattttcagtgatgtgccagacgagtgtggtggtatgttttcaactatataccgagtagaggatgggagggttctagaattttatatattaattaaatttggtttaaaatgcaggcaaaacttgttttatttttgtccctcctgtactctgaagcaaaaaaacttttttatttttaagataaaacaaatatcttcaaagtaatggcttagtttccatgttcttagctgtttctcaagtccttcctggagtgtacttgataatcctctaccctaagggtacttgggtagaaatgtttccgaagcactaaactgttagaagtagcataggctttagaatcgtggcactctcattttattagcaaagta

SEQ ID NO: 216 - DNA, 1199 bp, Homo sapiens
gtatctactatttcaaagttaatggaattatactcctggggctaagaatgagggttctagggccaacctctactacctatgtggcttgtgcaaattagttgtcccctttgtgcctcagttttacctacaacacagaaacaatgatattacctaccccatggactgttgtgaagattaaatgaattagtacatttactacacatagatctatttctcaaaataatgagcattcagatattagccatctgtaatgtagttggtgatgattatgattattagagtacatttataattggaggatcatttttgccgtagggaaatagaattattaatagtttgaggcacctgagaatattatgtgagaaactgattacattaaccacacccttaagatgagctctaattttgttgtatttgtcctgtttaaagccatctagttacaatagatggaacttttttgttctgattgctttttattccaatatcttaaatggtcacagggttatttcagtgaagagcagttaagagccttgaataatcacaggcaaatgttgaatgataagaaacaagctcagatccagttggaaattaggaaggccatggaatctgctgaacaaaaggaacaaggtttatcaagggatgtcacaaccgtgtggaagttgcgtattgtaagctattcaaaaaaagaaaaagattcaggtaagtatgtaaatgctttgtttttatcagttttattaacttaaaaaatgaccttactaacaaaatgattataaatccagataaagtataaagttagtttatatcagagaagcaaaatccactactaatgcccacaaagagataatataaaagaggatctgtatttattttgaaacaaacatttaaatgataatcacttcttccattgcatctttctcatctttctccaaacagttatactgagtatttggcgtccatcatcagatttatattctctgttaacagaaggaaagagatacagaatttatcatcttgcaacttcaaaatctaaaagtaaatctgaaagagctaacatacagttagcagcgacaaaaaaaactcagtatcaacaactaccggtacaaacctttcattgtaatttttcagttttgataagtgcttgttagtttatggaatctccatatgttgaatttttgttttgttttctgtaggtttcagat

SEQ ID NO: 217 - DNA, 1164 bp, Homo sapiens
ctagttacaatagatggaacttttttgttctgattgctttttattccaatatcttaaatggtcacagggttatttcagtgaagagcagttaagagccttgaataatcacaggcaaatgttgaatgataagaaacaagctcagatccagttggaaattaggaaggccatggaatctgctgaacaaaaggaacaaggtttatcaagggatgtcacaaccgtgtggaagttgcgtattgtaagctattcaaaaaaagaaaaagattcaggtaagtatgtaaatgctttgtttttatcagttttattaacttaaaaaatgaccttactaacaaaatgattataaatccagataaagtataaagttagtttatatcagagaagcaaaatccactactaatgcccacaaagagataatataaaagaggatctgtatttattttgaaacaaacatttaaatgataatcacttcttccattgcatctttctcatctttctccaaacagttatactgagtatttggcgtccatcatcagatttatattctctgttaacagaaggaaagagatacagaatttatcatcttgcaacttcaaaatctaaaagtaaatctgaaagagctaacatacagttagcagcgacaaaaaaaactcagtatcaacaactaccggtacaaacctttcattgtaatttttcagttttgataagtgcttgttagtttatggaatctccatatgttgaatttttgttttgttttctgtaggtttcagatgaaattttatttcagatttaccagccacgggagccccttcacttcagcaaatttttagatccagactttcagccatcttgttctgaggtggacctaataggatttgtcgtttctgttgtgaaaaaaacaggtaatgcacaatatagttaattttttttattgattcttttaaaaaacattgtcttttaaaatctcttatgattagttggagctaccagttggcaaatttgctagctaactagtgatctgaaagtaagcctctttgaacctctgatttttcatgaaaagcaattctctcaattctatattatttcaagggtaacaagttacatcctagtctgtgtacttaattttatagaaattgtccttaattttattttctgcaatttatgttttct

SEQ ID NO: 218 - DNA, 1139 bp, Homo sapiens
aagattcaggtaagtatgtaaatgctttgtttttatcagttttattaacttaaaaaatgaccttactaacaaaatgattataaatccagataaagtataaagttagtttatatcagagaagcaaaatccactactaatgcccacaaagagataatataaaagaggatctgtatttattttgaaacaaacatttaaatgataatcacttcttccattgcatctttctcatctttctccaaacagttatactgagtatttggcgtccatcatcagatttatattctctgttaacagaaggaaagagatacagaatttatcatcttgcaacttcaaaatctaaaagtaaatctgaaagagctaacatacagttagcagcgacaaaaaaaactcagtatcaacaactaccggtacaaacctttcattgtaatttttcagttttgataagtgcttgttagtttatggaatctccatatgttgaatttttgttttgttttctgtaggtttcagatgaaattttatttcagatttaccagccacgggagccccttcacttcagcaaatttttagatccagactttcagccatcttgttctgaggtggacctaataggatttgtcgtttctgttgtgaaaaaaacaggtaatgcacaatatagttaattttttttattgattcttttaaaaaacattgtcttttaaaatctcttatgattagttggagctaccagttggcaaatttgctagctaactagtgatctgaaagtaagcctctttgaacctctgatttttcatgaaaagcaattctctcaattctatattatttcaagggtaacaagttacatcctagtctgtgtacttaattttatagaaattgtccttaattttattttctgcaatttatgttttcttactatttctggtgtatgtgtttatcccattgtgatgttatattggtgtcctcaatttatttccttagccatacactctacttttcattgtacagggctatttattatctcagagtcaagcttttttttttttttttttttccccgagatggagtctcactctgttgcccaggctggagtgcagtggcgctatctcagcccactgcaagttctgcctcccaggttcacacca

SEQ ID NO: 219 - DNA, 1245 bp, Homo sapiens
cctgtatatgagctaataaaagttgcttccaatattttataattataatgtttcagtgagtaaccttgttcataggtgttttcatgaactttatgttcatgtgtattttactattattagaggtctatcttcagagaggagtacaagaaatgggattactgggtgcaaaggtaaatggatatgtgtctttgctaggtattgccaaatttatctccagaaatcttgcacaaatctgtactcctgttagcaatgtgtgcgtatacctgcttccacatgacctcagtaaaagaatgtgttgtcatattggtattgaaattttagcactgtaagcaacaggtcattttggaaaacctgagctttcgccaaattcagctattttgatttgcttttattattagcatataccaaaataaataggcatattagagtttcctttcttgcatcttaaaattcatctaacacatctataataacattcttttcttttttttccattctaggacttgcccctttcgtctatttgtcagacgaatgttacaatttactggcaataaagttttggatagaccttaatgaggacattattaagcctcatatgttaattgctgcaagcaacctccagtggcgaccagaatccaaatcaggccttcttactttatttgctggagatttttctgtgttttctgctagtccaaaagagggccactttcaagagacattcaacaaaatgaaaaatactgttgaggtaaggttacttttcagcatcaccacacattttggtatttttctattttgacagtccagtatcaaggaaatagcttttatacaaattggatagttgaggtagtatgtgaggtaaagtttaatcatatattaattgcccatgaacctcaggagatgggggaatggggaaatgacagcaactagaaagagaagaatgacttgaagggaaatgagttaggagaaattgtgagaaggatgttcagaaatgcagactttgtaagcaaactggaaattggttacaagaataatatgagttatctgtggtttgcagcagtcagcagtgtgattagttaataatatagagactacaggtttacatttaaactccatatctagtgttttatacagattatatttctttgacttgatttaatcccagataagagacactgatattattttccctagatcatgtatgcattttctgcttaaatctatatatacattatataatattagctg

SEQ ID NO: 220 - DNA, 1147 bp, Homo sapiens
atatttgaccagttgtgatttctcaagcaacagtttcatgtagtttaacctataaatcatttcaattaattcttggaacagacgtgaggtaggtgaggcaattctttcttttctctaaccaaagaagtacctttatagatgtgagatgattcccagctattaagtagtaaatagagctaggacttgagccccaatcttccagcttcaatccagatcatatgacagcttgctgattaaactagatgacagagaagatctctttccttcagatacacatactttttctctgttcccctctccctatcagctagattcccctaaatcactgatactggttttgtaattttgcatcggcatgtttgacaattggtatcacatttagggtttttcattcttttttggtccaaacttttcatttctgcttttaaaggaaatacttttggaaacataaatatgtgggtttgcaatttataaagcagcttttccacttattttcttagaatattgacatactttgcaatgaagcagaaaacaagcttatgcatatactgcatgcaaatgatcccaagtggtccaccccaactaaagactgtacttcagggccgtacactgctcaaatcattcctggtacaggaaacaagcttctggtaagttaatgtaaactcaaggaatattataagaagtatatatggaggccatcgtatattctgttgtatacctagtaaacatggtaaaatgtaattaaacttaattagaaaatgtggttgttatgtggctcctgtaagtatagttatttagaaattttatttattgaagcaagatatgaaactctgggtgcacactttccaaacaggtgctttcatttacatgtgattgaaaagtgttttttgtcatttatttcactgttccatacaattagggttgtttctaagctgtttgtaagctgtttctaagctatttaagtggttaaatcacagtagatgcaaatcaagctaaagtctttaacattggctaatggctgattcttaaatagctaatacttgctaagggtatctatattaactcatttaatcctcataacaaccctatgagataaaacctaagtcctcacttaacattgtcaataggtttttggaaactgatttta

SEQ ID NO: 221 - DNA, 2511 bp, Homo sapiens
acagtttccgagaacctatcaattatgttaagtgaggacttgactctattatcctgattttgtagatgaggagactgtggcatagagagaggttaagcaattgcctaataaggtcacaaagctagaaaagtaggtattagaacccagatagtgtgtgttctcaagatggctttaaaatatttatctttgtttaatctgttaataataaaaaacaaaagattaaagcataagtgacgtcccctacctccttttttatcttttactgtgattattcttcatcttccttccttttcatgtcattttatatgttcttatgtaaaattactttcatctagaataggaataatgtgaactgaaatcacctaacctattaggagttaggggagggagactgtgtgtaatatttgcgtgcttaaatattttcaatgaaaagttactttgatttagttttttatgttactacataattatgataggctacgttttcatttttttatcagatgtcttctcctaattgtgagatatattatcaaagtcctttatcactttgtatggccaaaaggaagtctgtttccacacctgtctcagcccagatgacttcaaagtcttgtaaaggggagaaagagattgatgaccaaaagaactgcaaaaagagaagagccttggatttcttgagtagactgcctttacctccacctgttagtcccatttgtacatttgtttctccggctgcacagaaggcatttcagccaccaaggagttgtggcaccaaatacgaaacacccataaagaaaaaagaactgaattctcctcagatgactccatttaaaaaattcaatgaaatttctcttttggaaagtaattcaatagctgacgaagaacttgcattgataaatacccaagctcttttgtctggttcaacaggagaaaaacaatttatatctgtcagtgaatccactaggactgctcccaccagttcagaagattatctcagactgaaacgacgttgtactacatctctgatcaaagaacaggagagttcccaggccagtacggaagaatgtgagaaaaataagcaggacacaattacaactaaaaaatatatctaagcatttgcaaaggcgacaataaattattgacgcttaacctttccagtttataagactggaatataatttcaaaccacacattagtacttatgttgcacaatgagaaaagaaattagtttcaaatttacctcagcgtttgtgtatcgggcaaaaatcgttttgcccgattccgtattggtatacttttgcttcagttgcatatcttaaaactaaatgtaatttattaactaatcaagaaaaacatctttggctgagctcggtggctcatgcctgtaatcccaacactttgagaagctgaggtgggaggagtgcttgaggccaggagttcaagaccagcctgggcaacatagggagacccccatctttacaaagaaaaaaaaaaggggaaaagaaaatcttttaaatctttggatttgatcactacaagtattattttacaagtgaaataaacataccattttcttttagattgtgtcattaaatggaatgaggtctcttagtacagttattttgatgcagataattccttttagtttagctactattttaggggattttttttagaggtaactcactatgaaatagttctccttaatgcaaatatgttggttctgctatagttccatcctgttcaaaagtcaggatgaatatgaagagtggtgtttccttttgagcaattcttcatccttaagtcagcatgattataagaaaaatagaaccctcagtgtaactctaattcctttttactattccagtgtgatctctgaaattaaattacttcaactaaaaattcaaatactttaaatcagaagatttcatagttaatttattttttttttcaacaaaatggtcatccaaactcaaacttgagaaaatatcttgctttcaaattggcactgattctgcctgctttatttttagcgctatcacaggacccagagcctatgcccttttaaacttaccacaaaagcagaagattaattcaatttaagatgatactctcatttgttacgtcctttttttttttttttggagatggagtcttgctttgtcgcccatgctggagtgcagtggcatgatcctggctcactgcagcctccacttcccgggttcacgtaattctcccacctcaagcctccctagtagctgggattacagggacgcaccaccatgcccagctaatttttgcatttttagtagagactgggttttaccatgttggccaagctggtctcaaactcctgatgtcaggtgatccatctgcctcagcctcccaaagtgctgggattataggcgtgagccactgtgcccggccaatatttgttactttcttaggtttaatagagaaaagggataaaacatttctaactgggagttaattgcatggagaaggtcttaaatc

SEQ ID NO: 222 - DNA, 1500 bp, Homo sapiens
aatctttggatttgatcactacaagtattattttacaagtgaaataaacataccattttcttttagattgtgtcattaaatggaatgaggtctcttagtacagttattttgatgcagataattccttttagtttagctactattttaggggattttttttagaggtaactcactatgaaatagttctccttaatgcaaatatgttggttctgctatagttccatcctgttcaaaagtcaggatgaatatgaagagtggtgtttccttttgagcaattcttcatccttaagtcagcatgattataagaaaaatagaaccctcagtgtaactctaattcctttttactattccagtgtgatctctgaaattaaattacttcaactaaaaattcaaatactttaaatcagaagatttcatagttaatttattttttttttcaacaaaatggtcatccaaactcaaacttgagaaaatatcttgctttcaaattggcactgattctgcctgctttatttttagcgctatcacaggacccagagcctatgcccttttaaacttaccacaaaagcagaagattaattcaatttaagatgatactctcatttgttacgtcctttttttttttttttggagatggagtcttgctttgtcgcccatgctggagtgcagtggcatgatcctggctcactgcagcctccacttcccgggttcacgtaattctcccacctcaagcctccctagtagctgggattacagggacgcaccaccatgcccagctaatttttgcatttttagtagagactgggttttaccatgttggccaagctggtctcaaactcctgatgtcaggtgatccatctgcctcagcctcccaaagtgctgggattataggcgtgagccactgtgcccggccaatatttgttactttcttaggtttaatagagaaaagggataaaacatttctaactgggagttaattgcatggagaaggtcttaaatcagatgttttaatgccttaaatgtctgtataatatcatgttttcaaatctaattataaatacgtttaaagccaagaataaatcttttaaaaaattgacttgtttccttccataactctgagccatgatttttctgttctgtaaaaagcattaacaaaattgtctattttgctactccctgtaacttaagtattctgcaagtcttattaatgagacttgttttgtttctaaaacagtttggttttcacatcctaattttgcagtgatccactctagaacaaggaataaaacttgggtttcaaacaggagaacagaaaaaattacaagaatttaaccttttcttttttgaatccttggtacaactgctattgtctgttctcatgtagaacacccattatgttgatagatatgtaatgcgcacacttttttataaattataaataacatccaagctacatgaaacaaaatatgaagcttgagtatatgtgcatattatcccctc

SEQ ID NO: 223 - DNA, 8166 bp, Homo sapiens
gctattgggcgctgggagtcgagggggcgggaggcgggaattcgtctcgggttgtgtggttgaggggtctggtgggtcgaggaaaggtaacggcggccccagtcctgcacacaaggccggggaagtagcagcacccccaggaagagggaggaggaagggctcgtgccctttcttctcttccagggctccgctttatttgctctcagaagtcggtttcctttccttttcttcagtgaatcggagctcagagcgttgcttcggtttccctccagacagttaggaatctgaaataaacaggaaagcactatgtcttcaatgtggtctgaatatacaattggtggggtgaagatttactttccttataaagcttacccgtcacagcttgctatgatgaattctattctcagaggattaaacagcaagcaacattgtttgttggagagtcccacaggaagtggaaaaagcttagccttactttgttctgctttagcatggcaacaatctcttagtgggaaaccagcagatgagggcgtaagtgaaaaagctgaagtacaattgtcatgttgttgtgcatgccattcaaaggattttacaaacaatgacatgaaccaaggaacttcacgtcatttcaactatccaagcacaccaccttctgaaagaaatggcacttcatcaacttgtcaagactcccctgaaaaaaccactctggctgcaaagttatctgctaagaaacaggcatccatatacagagatgaaaatgatgattttcaagtagagaagaaaagaattcgacccttagaaactacacagcagattagaaaacgtcattgctttggaacagaagtacacaatttggatgcaaaagttgattcaggaaagactgtaaaactcaactctccactggaaaagataaactccttttcgccacagaaaccccctggccactgttctaggtgctgttgttctactaaacaaggaaacagtcaagagtcatcgaataccattaagaaggatcatacagggaaatccaagatacccaaaatatattttgggacacgcacacacaagcagattgctcagattactagagagctccggaggacggcatattcaggggttccaatgactattctttccagcagggatcatacttgtgtccatcctgaggtagtcggtaacttcaacagaaatgagaagtgcatggaattgctagatgggaaaaacggaaaatcctgctatttttatcatggagttcataaaattagtgatcagcacacattacagactttccaagggatgtgcaaagcctgggatatagaagaacttgtcagcctggggaagaaactaaaggcctgtccatattacacagcccgagaactaatacaagatgctgacatcatattttgtccctacaactatcttctagatgcacaaataagggaaagtatggatttaaatctgaaagaacaggttgtcattttagatgaagctcataacatcgaggactgtgctcgggaatcagcaagttacagtgtaacagaagttcagcttcggtttgctcgggatgaactagatagtatggtcaacaataatataaggaagaaagatcatgaacccctacgagctgtgtgctgtagcctcattaattggttagaagcaaacgctgaatatcttgtagaaagagattatgaatcagcttgtaaaatatggagtggaaatgaaatgctcttaactttacacaaaatgggtatcaccactgctacttttcccattttgcagggacatttttctgctgttcttcaaaaagaggaaaaaatctcaccaatttatggtaaagaggaggcaagagaagtacctgttattagtgcatcaactcaaataatgcttaaaggactttttatggtacttgactatctttttaggcaaaatagcagatttgcagatgattataaaattgcgattcaacagacttactcctggacaaatcagattgatatttcagacaaaaatgggttgttggttctaccaaaaaataagaaacgttcacgacagaaaactgcagttcatgtgctaaacttttggtgcttaaatccagctgtggccttttcagatattaatggcaaagttcagaccattgttttgacatctggtacattatcaccaatgaaatccttttcgtcagaacttggtgttacatttactatccagctggaggctaatcatatcattaaaaattcacaggtttgggttggtaccattgggtcaggccccaagggtcggaatctctgtgctaccttccagaatactgaaacatttgagttccaagatgaagtgggagcacttttgttatctgtgtgccagactgtgagccaaggaattttgtgtttcttgccatcttacaagttattagaaaaattaaaagaacgttggctctctactggtttatggcataatctggagttggtgaagacagtcattgtagaaccacagggaggagaaaaaacaaattttgatgaattactgcaggtgtactatgacgcaatcaaatacaaaggagagaaagatggagctctcctggtagcagtttgtcgtggtaaagtgagtgagggtctggatttctcagatgacaatgcccgtgctgtcataacaataggaattccttttccaaatgtgaaagatctacaggttgaactaaaacgacaatacaatgaccaccattcaaaattgagaggtcttctacctggccgtcagtggtatgaaattcaagcatacagggccttaaaccaggcccttggtagatgtattagacacagaaatgattggggagctcttattctagtggatgatcgctttaggaataacccaagtcgctatatatctggactttctaaatgggtacggcagcagattcagcaccattcaacctttgaaagtgcactggaatccttggctgaattttccaaaaagcatcaaaaagttcttaatgtatccataaaggacagaaccaatatacaggacaatgagtctacacttgaagtgacctctttaaagtacagtacctcaccttatttactggaagcagcaagtcatctatcaccagaaaattttgtggaagatgaagcaaagatatgtgtccaggaactacagtgtcctaaaattattaccaaaaattcacctctaccaagtagcattatctccagaaaggagaaaaatgatccagtattcctggaagaagcagggaaagcagaaaaaattgtgatttccagatccacaagcccaactttcaacaaacaaacaaagagagttagctggtcaagctttaattctttgggacagtattttactggtaaaataccgaaggcaacacctgagctcgggtcatcagagaatagtgcctctagtcctccccgtttcaaaacagagaagatggaaagtaaaactgttttgcccttcactgataaatgtgaatcctcaaatctgacagtaaacacatcgtttggatcatgccctcaatcagaaaccattatttcatcattaaagattgatgccacccttactagaaaaaatcattctgaacatccgctctgttctgaagaagccctggatccagacattgaattgtctctagtaagtgaagaagataaacagtccacttcaaatagagattttgaaacagaagcagaagatgaatctatctattttacacctgaactttatgatcctgaagatacagatgaagaaaaaaatgacctagctgaaactgatagaggaaatagattggctaacaattcagattgcattttagctaaagacctttttgaaattagaactataaaagaagtagattcagccagagaagtgaaagctgaggattgcatagatacaaagttgaatggaattctgcatattgaagaaagtaaaattgatgacattgatggtaatgtaaaaacaacttggataaatgaactggaactgggaaaaactcatgaaatagaaataaagaactttaaaccatctccttccaaaaataaaggcatgtttcctggttttaagtaataatacttaactctcaagctaagtaaaaatatgtcatcatgcttatgttaaactctgttgtaagtaataatttgtaaattgaataagtggcatactttttaaaaaactattttatgttcagaaatgtaaatgttattattcttgagtttttgggtttttttttttgagacagagtcttggtctgttgcccaggctggaatgcagtggtgtgctctgggctcactgcaaccttcacctccaggttcaagtgattctcctgcctcagccttctgagtagctgggactacaggtgtgcaccaccatgcccagctagtttttgtatttttagtagagatggggtttcaccatgttggccaggctggtctcgaactcctggcctcgtgatctgcccttctctgcctccctaagttgctgggattacaggtgtgagccacagtgcctggcccattcttgagttttgataaagtaattcatacaaagtactgtcctcaaataagtcttccttagctaaatgcaatttaaaattattcaaagatcctagggcacttctagtttcacgtaaatattcatattaggtggttctcttcatccatttgttttcacactgatacataaaaattaacagcagtctaatctagtgacacctcagtcatatttcgctatagattttacctcaaatcagtccaagactttttcagagatcaccatttgtcttgaaaggtttatttcgttattaaactgcctacttataagtaattaagagaaattaagaaagtagtatgcatttttaattgaaattgttttacattctttgtataataaacctaaaaccaaacatgtcataaacaaattgacgtaaagatataaaatgccaaatgaagtattccaaattttctattctaattatttagcttcaccatcattgtggaaaaaaatactagatcctgcttagtattatatatttttcctagtggatcagtgagtaataagtaccaaacactagactagaaggtaatttctacattgtttagaaagggtgaaacaatttatcccctctggtattgttctagcataagctttagttatacaatgattaagatagaaaacttcatatataaatttgataagcaaacccacatttatagctgcagctaaaatatgtttccttagggcacagtaatcctttctgtgaattttgaccttgtttgtgtttttgtgaatgaagctatatgtctaatcaaaaatgattataaaagaggctcatctctgacatcattccaaaaatacattcattgatctctttttaagaaacatctgttattcactgggcattgggactttttgtgagtaatttgaattgaaattttatgagctatccaagaattctgtatggtctattattttcaagtcaaaatttccagtaaggatttactttacatttcatttggataaatgaatcattatataggtatgtctttgcttccattttgagacatttagatttttacagcctgtttctatagcatttgatgttacaactctaagcgtagttcaaagacatttaaattgacaagttaccagttaaagaatttagaatatattagatcccatctagtattatatattttttctagttgatcattgagcagtaaataccaaatactcgattagaaggtaatttttacattgttttgaaagggtgaaacaatttatctcctctggtattattcttaaaccacagatagggatagtagggtagtgaaacgaataaatacctggtagaagacaagagacttgggctctacacctggctctgccactgatttgctaagtcatattggcaatcaccacacccttcagggaattagtttcatctgtaaaatgcagcggttagtactataaaatcatacaaatttctttgtgctttgagaatctataaaggaatgtctgttgatattctgagtcgattttcatttgcttttgttccagaacggttaaaataaagcatattatttcatttaaaaagtaaagtggctcttactcatttacatttagggaacgatggtgacgtggtttggctatgtccccagccagatctcatcttgaattgtagttcccataatcccgacgtgttgtgggaaggacccagtgggaggtaattgaatcgtgggggcggttaccctcatgcggttctcgtgatactgagttcttatgagacctgatgattttataaggagcttttccctgcttcactctcattcttctctcctgctgccctgtgaaaagttgccttccgccatgattgtaagtttcttgaggcctcctcagtcatgcagaactgtgagtcaattaaacctctttcctttataaattacccagtcttgggtatgactttattagcagcatgagaacagactgacacagatggtatatgtgcataataacttggaaagctagatatttattttcgcaatgctacaattaaaacattttgaggacttttaaaattacctttagggccaggcgcggtggctcacgcctgtaatcccagcactttgggaggccgaggcgggcggatcacgaggtcaggagatcgagaccatcctggttaacacggtgaaaccccgtctctactaaaaatacaaaaaattagccaggcgtggtggcgggcgcctgtagtcccagctactcaggaggctgaggcaggagaatggcgtgaacccgggaggtggagcttgcagtgagccgagattgcgccactgcactccagcctgggcgacagagcgggactccgtctcaaaaaaaaaaaaaaaaagaaattacctttagaattggtaaactacatgagaaaattaagcatattattcatatcttagtgttattacccaacttcatctccaatactttcccctttccctagctagatatgtttttgtttgtttgttttagacagtcttgctctgtcgctcaggctggagtgcaaaggcacgatcttggctcactgcaacctctgcctcgcaggttaaagcgattctcatgtctcagcctcctgcgtagctgggattacaggtgtacaccactgcacccagctaatttttttttttttttttttttaagtatcgacagggtttcaccatgttggccaggctggtctcaaactcctgacctcaagtgatctgcccacctcggcctcccaaagtgttgggattacaggcgtgagccaccatgcctggcctagatattttttattctttccaaaatttaattctccctgaagttaaaaattttcattactgagaatgtacatagagatgtgtcacaaccctttagtaattccaaaaggtgtttcaaaaattttatacaatgataatcactgttgaaacaggtgtatattctcctcagatcatgactgaccaagatgatattccaagaagtaaactactggcctttatagagtaggatgtaggccattttcattactgataacatacttttaaaagaaatgtttacagatttaaataagttaaaacatctaaatgcttttaaaagagcacctggcacattgcaagttattcattattaattagtagatgaatcatatatctggagtgcacccttgctctatatgaaagcttccctaactatagatatataggtgatagactgacaataaagatttgaggaaagaaaaattatttggctggcttattttttaagcttttgagatgtataaggtagagattgtttatcaaataatttatgtgacacattcaatgcatatgaaataattatctaatactgaatttattcaaggactgaaagtatatagagcacacaggctgcaaaccaggaaaactaccagttagagacagggctttattcttggaataaaggtacaatgtaaagagtagatgtttcatgacttgattaaattatttaaaactgtctagaattgtgttataaaactattactatgtttctatgcacttagttattacatgggtttaaatttggcactgtttctaagtttctataaggctttgttgttaagatctttctattcaaaacattaattttaacaaaaagcttttccccgttatttttctgcaa

SEQ ID NO: 224 - DNA, 8166 bp, Homo sapiens; identical to SEQ ID NO: 223

SEQ ID NO: 225 - DNA, 1500 bp, Homo sapiens
actgggaagttcataatttttttcagtattaccaatagatattattgtcaattgcggtatcacattttctttcgtttagattacgtctttaggataaatatctggagctcagattactaggtcaaagggtagagtttatttttatgactacaagttttgtcatttttggtaagatatatcacaattgacaatgaggcaaacaaatcaactagccccctcctgctctttcttcccagcaaactccttccccaaactagttacttgaatttgagaaacagtatgaggttttgccttttggagacattattatttgagccaagtttaggttatacagattttttaaaaaaataacatgatttggcaagatcatgatgaacctccttttctttgagtaaattaaagtactactggcaaataataaactggtcttaggagggatggaaggcggataagccttaatggaagtagaagtgatctgatactggagaccctgagagcttgtctctggcttattttagcatccgggaaagccttgaatattatgaaagatagattgtagcccgatgtcacagagccttcttacttaagtttggctcagcagtctggcaattcccgcctgagtcttcgctatcctggctactgcaaagctgggtaatttaaattgagtggcactgataaatgctcaaagaacttggcaaagcttaaagatacttcctttccgctggtctacggacgtgaagaatgagacttccagtttccaaggaatttgctgcatagactctatcgccggtttcaaaagtcaaactgagacgactttctactttaaacaaacactagggatttgctggagtggcgacaaccttccgccgcgtaccttgagcccttgtttttttttttttttttcggagacttccattggatgccgaagttctcgccccctcacctcgcaccgggactggttgattcctggccttggcgggtgattggtcgagctcgctgggctattgggcgctgggagtcgagggggcgggaggcgggaattcgtctcgggttgtgtggttgaggggtctggtgggtcgaggaaaggtaacggcggccccagtcctgcacacaaggccggggaagtagcagcacccccaggaagagggaggaggaagggctcgtgccctttcttctcttccagggctccgctttatttgctctcagaagtcggtttcctttccttttcttcagtgaatcggagctcagagcgttgcttcggtttccctccagacaggcaagtcggagggaagtccacggaaagggcttgagttcttctgcacagcctgcgggcccatgggtggtgactggatcaccagggtctcggggatctcaactggctgggggaggagggagatacggggcagaaaacctgaggagggagcctatccttacctcctttgagcgcaggcctgttcttagcccgggcgctgcgttaattcttggcgggaggcagagggg

SEQ ID NO: 226 - DNA, 1276 bp, Homo sapiens
gtctctggcttattttagcatccgggaaagccttgaatattatgaaagatagattgtagcccgatgtcacagagccttcttacttaagtttggctcagcagtctggcaattcccgcctgagtcttcgctatcctggctactgcaaagctgggtaatttaaattgagtggcactgataaatgctcaaagaacttggcaaagcttaaagatacttcctttccgctggtctacggacgtgaagaatgagacttccagtttccaaggaatttgctgcatagactctatcgccggtttcaaaagtcaaactgagacgactttctactttaaacaaacactagggatttgctggagtggcgacaaccttccgccgcgtaccttgagcccttgtttttttttttttttttcggagacttccattggatgccgaagttctcgccccctcacctcgcaccgggactggttgattcctggccttggcgggtgattggtcgagctcgctgggctattgggcgctgggagtcgagggggcgggaggcgggaattcgtctcgggttgtgtggttgaggggtctggtgggtcgaggaaaggtaacggcggccccagtcctgcacacaaggccggggaagtagcagcacccccaggaagagggaggaggaagggctcgtgccctttcttctcttccagggctccgctttatttgctctcagaagtcggtttcctttccttttcttcagtgaatcggagctcagagcgttgcttcggtttccctccagacaggcaagtcggagggaagtccacggaaagggcttgagttcttctgcacagcctgcgggcccatgggtggtgactggatcaccagggtctcggggatctcaactggctgggggaggagggagatacggggcagaaaacctgaggagggagcctatccttacctcctttgagcgcaggcctgttcttagcccgggcgctgcgttaattcttggcgggaggcagaggggtgtgtttatcctttatgcaatgtttgggggaagctaccccattttgacactattgttgccacagccggggtacaggacgggctgatttctagattatatctgagtaactaggccagcgttgagttgttgattcatattaagaggttagattccaccatacctcattctcagagctttacagatagaatcgcaaaatgttagagctggaaaataccctagaataatggttcttcttttggagcacacaagcagtggtgaatgttattattggcttca

SEQ ID NO: 227 - DNA, 1123 bp, Homo sapiens
tcttctaactggaggactgcagaaaggggtaacacaaaggggaagaactggagaaagagtgatgctacggagttgtagagagagaggcctcaggaacttatttgtttctgtaggttgattacatctgatctaactgttacaagagctcatgtttaatctggtatgtactttatcatatttgcacattatttcacttaatcattaccacaatcctatggggtacatgcagtcactgtggcttagagaaggtaactaactttcccgaagtcacacaactaatacctggcagagtgaaggatacaaatctagatttgttagactctaagacatgctcttgaccgctgtgatttataagactaggaaattattttgtttccatttgttttgtttatacttttattaattccagtttctgtttccagatttctcccttagttttggttctctggttttctttgtaaggcgtgtctcaatatttgacattttcatttctgttgtagttaggaatctgaaataaacaggaaagcactatgtcttcaatgtggtctgaatatacaattggtggggtgaagatttactttccttataaagcttacccgtcacagcttgctatgatgaattctgtaagtatttttcagcagttaagtttttattaagatatagatacttatgacccataaagtacattgagtatttgactgcattcatattctcagtaaatggagaatattttctgggttcacttggaagaatatctaacctctgggaaactactgattgcagctaaactgtatatatctgtggttaaggcaaagaagaacattctgaaaaatgttctcagctcatttggaatttctatacttttaatgaaaaactgctatacttttaagtaaaaacagagtatttactatcttttacacagaatactatttttctcaccattgttttgtttggatcatgtagaaaattaatatacaaatttgagtaaaccagctttccagttttgttacagctattttgccatatgtacttcatatcttatttactggtaacaagattattagtatcctgaatttgttcttttcctttcctagccatgtttttatacttttattacatatat

SEQ ID NO: 228 - DNA, 1112 bp, Homo sapiens
gattacaagcgtggctgctgctgtgaactttcttatgcatgtttccttgtgttcatgtgggaaaggttttgggtgtacacatagaactggacttgctggagctgggcatcttcactttataagaaattgtttatttctctaccaagtagttgtaacaatttgtactctcactagcagtatccttcattaagttttcatcaaatatattgataggtagtaatgtattctggttttacagaaatcattgatgcttgcataattctggcacagattcctcttttcatttcttctcttgtgcttgatattttagtaagataatcttagggagaggtgtaaaggaatacagtttggatttaactaaatatgagttccttctgctattgttgtgttccctggagtgcaatctcacttttccttgctgttctatttaaacttcagatggagagagacctttataaagttaatatgtttattattttcattggtttctgtgttcatagattctcagaggattaaacagcaagcaacattgtttgttggagagtcccacaggaagtggaaaaagcttagccttactttgttctgctttagcatggcaacaatctcttagtggtaagtagttgcttgatatcttcaggttacttactgggatctgagaaaatataatacagtattctttatccagactggttcagccatgctgtcgctaacttaaatatttgtttaaagatgtttctttgaaataagttataaatcttccaaaagagtttcaatatagcaaaatatgtttaattaatgctaaaatagtattgaacataatttagtcttttgatgagtcggaaagtacataaagacttggcagcctgggcagcatggtgataccccatctctacaaaaattgacaatcaattagccaggcatggtgatgtacacttgtagtcccagctacttgggagactgaggtggtaggatcgcttgagcccaggaggtcgaggttgcagagagctgtgattgtgcactccagcctgggtgaaagaaaacaaacaaacaaagttttggatgcttagagttattataaaaataattagatgataatttgtatgtaaaagatg

SEQ ID NO: 229 - DNA, 1174 bp, Homo sapiens
tggtttttgaaacagagtcttgctctgtcgcctaggctggagtgcagtggcatgacctctgctcattgctacctctgcctcccaggttcaagcgattctcctgcctcagcctcctgagtaggtggtattacaggcgtgcactaccacgcctggctaatttttgtatttttagtagagacagggttttaccatattggccaggctggtctcaaactcctgacttcaattgatgtgcctgcctcggcctcccaaagtgctaggataacaggcgtgagccactgtgtccaaccaaatgtttttggcttatttctctcctgtcctaatttgatgctgcagataaagtgaccagcttgtccaggtttgccaggtaccttcctggtgttagccctaaaaatcttttatcttaggaaacctcccaatcctgggtgaactgggctgtagagaatgattgatgtttatttaattagatatattataaatagatgttctttcatttttagggaaaccagcagatgagggcgtaagtgaaaaagctgaagtacaattgtcatgttgttgtgcatgccattcaaaggattttacaaacaatgacatgaaccaaggaacttcacgtcatttcaactatccaagcacaccaccttctgaaagaaatggcacttcatcaacttgtcaaggtaatttatattttgcctgggtcagttgatatctgtaataagagtcttaattattactgttataagccctaatttatataagtttggttagcataactgattatatatctctatctagtttctctggaatgattttaaaatagcacagagtggtcaaaaatccatagacgtttttaaattcttggtttgacttttaatttattgagacattttgttgtcctaaataattttttaaggaaggcaaggcaaaataaatgattttccaaaattgatgttatttgtagccattattgttaattatatgttagaattctataaaacaatgtttgtatcctaagacgaaatctaattagcctcattgattcattcttgataagtttgcctggccttctgaggccagtatcctacataagtatcaggtatgtttatgtgtgatctttaaataatttttactaattttagagaaatacattaagagtaacataagattattaataata

SEQ ID NO: 230 - DNA, 1128 bp, Homo sapiens
tgggataattaatgttatttggtgattaagaggtcctggatgaccttgagaaggagctttcaggattatgggattaaaagacagattatatgagcttgattctataatcaatggttttgctctaaagaacgtggagaaacttagtagggaagaaacgttgatactgtaaagaaagatttttacagacatgaaatatattttcttcagagatccttgcagttatacattttaaatcatgttattgggagtagtctacaagtacataaggcgatttaaaaaatcaaattggacttttcctattgaaagcatgtttctcagaatctttggtaaagtaaactgaatggtagagaagtactttttaaacatgtttaagtttcatgttttagattatggtatgaaatttctagaaataagccttacatcctggttccagttttcttctagaaaaattgcctacctgtaagttatttatgctgttttttttaaattacttatataagactcccctgaaaaaaccactctggctgcaaagttatctgctaagaaacaggcatccatatacagagatgaaaatgatgattttcaagtagagaagaaaagaattcgacccttagaaactacacagcaggtaaacagagtttattggcagtaaataacccagttagttacagctgaacatggtagtcaagtatcatgtttttaatgcacttgtggagattagttgggtcatgtgacagccataaattaataatttgttgtaatttcattttgtagagttacttgttacaaaggagtttattatagcagattattcacagtaacatgtcgttcaagtgaaactgcatggtgtttcttatatatgaggaatttgatagtaaaatatttacttaaggcatatcttagtgatatactactttgtactttttaactcctccattgtttttatcttaaaatagcatttccttttggctaaaatacctttgatatgattattcatgttatggatattttggaattgatagttttaatgtaatgacaagatgtattcttactgagtttttaagattgatacatgataaaatatgtatatttatttctaaaaattactaaaaggcttgaattaccaga

SEQ ID NO: 231 - DNA, 1120 bp, Homo sapiens
caacttggtttatcaaatatctagtaagtaacagtgataatagtaatcgagtaatttattccatcctgtaggaaatcatgactgtttacattaaaagttttattctgagttcttttcaatgtagaattatgcttaaattttgatttacttttattttccaattagatataagattggactttccaatattgctatatttgatgtccatatgatgggactattttatgagaagttcattttacaatactctaattttgatacatcactaattaaagatagtttggctaagattcatgagtcactactatgttctatttcctttaagtgttgtaatgaggtgcttatttgcatttttaaaatttcttttattattgcctgttagaaatagtctttttttggatgcaggaaaaaaatacatagagctgttttggcctttgagaacaactagccagttaaacttctagttcaccttaaacttcattttggttctgtgtttacagattagaaaacgtcattgctttggaacagaagtacacaatttggatgcaaaagttgattcaggaaagactgtaaaactcaactctccactggaaaagataaactccttttcgccacagaaagtatgtattaatgccattgttcagttttaaagaaggaagatatggaattttctaaaccaatttttgacaaaagaggaacaatagtataatacaaaggacagtagcaacccactcagaagtcctcaatgctgtcacatctctgttactaatgtgtgagatggcaaagcctattctctctatgcctcgtttccttatttataaaataagagaattggactagagagagatctgaaagtcatttttttctgttctgtattttaatgtttgtaaattctccaactccttacagttctttcaggattcttagggcaacagttctcaaggagtagtccaaggagttctagatattgagatttttttggggagtgatctgtgaggtgaaaattatttttgtaataatattaagatgttgtaggccaggcgtggtggctcacgcctgtaatcccagcactttgggaggccaaggcgggtggatcacttgagttcacgagtttgaaacc

SEQ ID NO: 232 - DNA, 1291 bp, Homo sapiens
atcctttagattcaacttgataattctattcttttgtaaactatatttaaaagtgcttcaaaagcattggtgtattaaggaatatttgaatgaactatgctgtgaacaaaactattaactctaaactataatatcacaagttcgtatgaagcctaagaaaaaattaaaattgttcctactttgttttatcatttttataatttatgaaagaggagagttaaaatgtactcaaaacatttggaattggagagttagagtggtatgttggaaagaatgcaaatttggaaatatcatttataacttttaaaagaaagaatgaggaccaattttaaattgtagttttttctttaatggcaagttttagatactataatttcttgttatttctctttatttgaccattgtgattcattacttacaggttctgattccatgtgaggtttgataacgttttttatggtagtttagatattagttatcgtttctttcctttcttacagccccctggccactgttctaggtgctgttgttctactaaacaaggaaacagtcaagagtcatcgaataccattaagaaggatcatacagggaaatccaagatacccaaaatatattttgggacacgcacacacaagcagattgctcagattactagagagctccggaggacggcatattcaggggttccaatgactattctttccagcagggatcatacttgtgtccatcctgaggtagtcggtaacttcaacagaaatgagaagtgcatggaattgctagatgggaaaaacgtgagtaaagttattttgtgttagagaaaaaataaggctgaaaatatttaaattactcagtatgtgttttatatgtacattttagtgataatcaacttcggaaaatcaaattaactgctagtattgatatcttttaaaaaacaattttcctgtaataaaatctttagtcaagttttaaagtatgggatttggtcttaaagcttgggatatttaattccttgaaattaatttctgttgtagtcagacatcttagtttcttcttttaaatcctgctaccaaaaatagtcaaacttggatgatatcatatgaggagatagaagtgtttaaatggtttagtctaattagatctaattaatatactttatatacttaaaaacttcaaaagcagatagtttatttaggctgtctgggcaaagtttgaattttcttaattgaatgagaaatataatgattatcccacctcataattctgataaatacaaacccctcttttaaaagtt

SEQ ID NO: 233 - DNA, 1222 bp, Homo sapiens
tacttaccttccttccttcttatttatatttgaataagaaatactatcacatggctcaaagttgaaaaggtacaaaagggtctacagagaaaaatctctcactcctgtgcccagtcacttaattctcatccttggaagcaaccagtgataccattgttttgtgaatcctttcagaagtatttcatgcctaacatcagtttaatcagaaaaaaaaaggcataacaaacatatttaaaagaaatttttttcaagttaatttagggtatttggagctcttccgatttggacttctatctaagtctgagtcaaccagacttcgttgtgattgtagctatggtattgtctcaaaaaagacaaaaaattagccaggtgtggtggcgtagccagtaaaatcttagccttgtggctttaatgatgttcctcaaattctgagataagcttattttattccttctatgctaatattggttcacatttcagttatgcatatttgtttctagggaaaatcctgctatttttatcatggagttcataaaattagtgatcagcacacattacagactttccaagggatgtgcaaagcctgggatatagaagaacttgtcagcctggggaagaaactaaaggcctgtccatattacacagcccgagaactaatacaagatgctgacatcatattttgtccctacaactatcttctagatgcacaaataagggaaagtgtgagtatatgtgtaaaaatgagaaccttcttcctactcatggagatgtaaatgttgaatgtaaaagcttttagatgttttaattttttttgctttaatttatgtaaataaatttgtgtaaacatattagagtactgaaaacatatcctaacatgggttaaaatcaacccactcattttaatttccaaaataacaagcagttttaaggaacatagtgactgaagtgggattacagcaggatttctctttgcatttatgaatattcaaaaagaattatttagaaacatttctctgaaaaaactatgttttgaagaacttatgtgggggaataaaattatgccttgtgagctttgagaagtgaacttcagataatggcatttgtgtttgtttgcctggttctttttagagacatgcaattgttaacagcataagacaaaaagtgaataatttggcatagtcaattgttattcctgtcttcagatctgactgcacaattcatc

SEQ ID NO: 234 - DNA, 1200 bp, Homo sapiens
atatatattatgttagtattttaagagtcattttaatcttgtattgttattttacttttaaaggttttatgcttttaatcttgtattgttattttacttttaaaggtcttatgcttttaatcttatattgttattttatttttaaaggtcttataattagtttgtaaaattatgttggaaacactttcatagtgggattttatacctttctgtgtagcctgtggtaccttgatccagactcactgacatatttttgttgctgtcgataggtttgcaaagtattttaagagtaaaaaaatggcaaacacaataatgtagagctgatatttggttggccatagtgcttcagaagttttatttaagacctagaatctctgttgcttatgtaattgcatttgcaatattggcctatagtgtgaattttaaaatgaaatatcttgcctgctgttgttaaatctattttgccaaatgttttacaagaaaattcttttatcttatagatggatttaaatctgaaagaacaggttgtcattttagatgaagctcataacatcgaggactgtgctcgggaatcagcaagttacagtgtaacagaagttcagcttcggtttgctcgggatgaactagatagtatggtcaacaataatataaggaagaaagatcatgaacccctacgagctgtgtgctgtagcctcattaagtaagaagatttgtctattagtgtatttgtgctgcctttatatgaaaaatatgtttgattatgccagagtatttaaagttagtaaactttggttaactaggcttcttgggaaatgaattgttccttgccagttaagctttaaaaacaaggctagtccaaccttttgtcttgttcacaagaatataatgaacataagtgatttttaaaaatgaataattgtgaatcttattcctaatttggcaggataacataatagccccgaaggatgtgtctaggatattgaaccagaaactaaacgtgcttttaattaatatattttaaaattctggatcatggctttaatttattgctttattctccaatttaaataggattctagtttcatgggttttaattaatcaagatttcagtactctaaaataatatatttagtactagctttatgacaatttacactaatttttcttttattagacattaagttgttgatctagaatctt

SEQ ID NO: 235 - DNA, 1133 bp, Homo sapiens
ttattttcactacccagaacaatgtctggaataaaataggcattcaaacacttaatgtatgaatgtgtatatatatcaatgaatgtatttatatattttctagtaattctcttttttgtgttaatatgtaacactttaatttctttattaggttgttttgcatttccttttatatatatttgggataagtacctaagacctggctctcagttgaagagacattagctaagtaaagcaatgtgaatccacaaaacaagtgggaaatcatatgcatgtttgtttcttctgaataaaagctttcttttcagttatataaagtttattttgcaatatgagacatgaatgctttttaaaaggtgtcttaattaatccacattcatgtcctaagaatgtcaagatatacagatcaacgcatgacaataatgatgattctcttgttctgctgaaatagtgtgtgtaaggatgatactggttgacacaattgttttattttatttcagttggttagaagcaaacgctgaatatcttgtagaaagagattatgaatcagcttgtaaaatatggagtggaaatgaaatgctcttaactttacacaaaatgggtatcaccactgctacttttcccattttgcaggtaagatattttttctacctgtgaaacgtatttagtgaattagaagtgatttagtcgtgactaaatccagattaaatctagtgagtaacccagaattgttaaatatagcaatttaattttttaaaaattttattatctaaatttgataatctttaagtgatggcatgggtaaattgtgggtgaaaatatagcattatttagtttgaaggaaattagtctttaaagggattaattgctttgtttaaagctaaaaggagtcaatatttttaggttgtagacttacttagtcaattgtaaaagttaaaattttagaaaataaaaagaggagaaattcctattttgttcatcttaatttagaaattataaacctgatattcatggagagatcatgagtaggctttggaagactatgaaacttatgaagctatatgcaaaattttatgagcgtatccttttgtacatttttctaaatagaggctgcataaatttcattatatttt

SEQ ID NO: 236 - DNA, 1155 bp, Homo sapiens
ctgggtaacttacaaagaaaggaggtttatttggttcacagttctgcagcttgtacgaagcatggctccagcatctaattttgaggaccttagcctgcttccactgatggcaaaaggtgaaggggagctggtttgtacagatcatatggcaagagaagaagcgagagagagaagggagggaggtgtcaggctctttctaacaaccagctctcgtgggaactaacagagcactaactcaccccctctctacttagggagggcgttaatctattcatgaggtatctacccccatggtcccaaacctcctgatatgccccacttccattactggggatgaaatttcaatatcagatttggagaagtcagactatcaaactatagcaattctgttcacctaaaatttcaatgcatgttttgttgggtttcattgtatttttgagaagtttctttttccaattccctcccaacccctctatacttaatatggtaatttcttatagggacatttttctgctgttcttcaaaaagaggaaaaaatctcaccaatttatggtaaagaggaggcaagagaagtacctgttattagtgcatcaactcaaataatgcttaaaggactttttatggtacttgactatctttttaggcaaaatagcaggtaagtgaagataactagtatgtattttccttttaaaaatagcctaatttggatgctagcatgtgtttaatacatacctattttgggtgagtaaataggagaattgaaaacaagtgttatagatattattatatatttgctcttattgacacagacttagaggaattgaaattagtctgatgcttttttgagacagggacttctctgtcacccaggctgaagtgcagttgcatgatcacagctcactgcaactttgacctcctgggcttaagcaatcctcccacctgtttcctgagtagctgggattacaggtgtgcaacacccacacccagctaattttttaatttttattttttttgtagagatgagatctcactatgttgatcaggatggtcttgaactcctggcctcaagtgatcctcccacctcagcctcccaaagtgctaggattgtaagtgtgagcccatgcctggccaaaattagtcttttatattaatgaa

SEQ ID NO: 237 - DNA, 1166 bp, Homo sapiens
ggaatgtaagaattttataacttgttgctaatactttaaaaactttcagtaaaaattatccttctattttctcatttaataaaaaagtataacccaccttttagtctctttaaccataatactgttttctattttgtaactcatcatgtagtagagcatgcagagagctctggactgggagttaggaggcctggattttaattctgcttctgccatgacatatgtaatgtttgaaaatgaggttaggaagtagctgataaaagatagatggttagatgatttctaatattccctctgagaatcagttgattctatgattaatggctttattaatatcagaattactgaatttaattaatggtaaggagaatgttatttttgaatgggaaggtaccagctctttcaaatgagttttaatgtaatcagtttttatattgtatgtagctgggtcataggttttaaaagttttgccacttaattagcactttctttgcatctagatttgcagatgattataaaattgcgattcaacagacttactcctggacaaatcagattgatatttcagacaaaaatgggttgttggttctaccaaaaaataagaaacgttcacgacagaaaactgcagttcatgtgctaaacttttggtgcttaaatccagctgtggtaagctcatcatgtaaatggaaattttgtcttcttgctcagtaccagcattttaataaatgtggttgactcttttaaagatagttgtttgttgttgttgttgttgttgttttgaggcagggtcttgctcttcacccaggctggagtgcagtggtgcaatctcagctcactgtagccttgaccttccaggctcaagcgatcctcccaccttagcttcccgagtagctgggactataggcatgtgtcaccatgcccggctaatttttgtattttttgtagagacggggtttcaccatattgcccaggctggtctcagactcctagactcaagcgatcttcctgcttcagcctcccaaagtgctgggattacaggtgtgagccactttgcccagcctcttctaaagataattttatttatctaatgttgttttcttttaggccttttcagatattaatggcaaagttcagaccattgttttgacatctggtacattatcacc

SEQ ID NO: 238 - DNA, 1141 bp, Homo sapiens
aacgttcacgacagaaaactgcagttcatgtgctaaacttttggtgcttaaatccagctgtggtaagctcatcatgtaaatggaaattttgtcttcttgctcagtaccagcattttaataaatgtggttgactcttttaaagatagttgtttgttgttgttgttgttgttgttttgaggcagggtcttgctcttcacccaggctggagtgcagtggtgcaatctcagctcactgtagccttgaccttccaggctcaagcgatcctcccaccttagcttcccgagtagctgggactataggcatgtgtcaccatgcccggctaatttttgtattttttgtagagacggggtttcaccatattgcccaggctggtctcagactcctagactcaagcgatcttcctgcttcagcctcccaaagtgctgggattacaggtgtgagccactttgcccagcctcttctaaagataattttatttatctaatgttgttttcttttaggccttttcagatattaatggcaaagttcagaccattgttttgacatctggtacattatcaccaatgaaatccttttcgtcagaacttggtgttacatttactatccagctggaggctaatcatatcattaaaaattcacaggttagttgttgtttttttttttggaaggccttcagtgtttctacttcaatataactatgtaaacaagttagaagatacctgaagtgccagcaagtaaatcttggtaggaaattcaacattccagttttacaataaaagaaaatctgtcagctacttaatgatgtgtcaacagaaggaaataatccagtcacttgggatgcaaaaggctgtatttcagcttcttcttctaagtaagttttagttttgtaatgaaaacaaaattttgatttctttaattctcattgtataattatgttttatttattgattgattgatttttgagacagagtctggctctgttgcccaggctggagtgcagtggtgtgatcttggctcactcgtgtttaagcaattctcctgcttcagcctctcaagttgctgagattacaggtgtgcgccgcacgcctggctaattttttatttttttggtagagatggggtttcagcatgttgtccattc

SEQ ID NO: 239 - DNA, 1162 bp, Homo sapiens
aataactgtaagatgtggtgggtgtgatttttttctatgactaaggatctttgagcaccaatgaatttttgaaagagtagttcctgtcatttttgagacttgcctatggcaaattatactggccttcatccccagtattttggaattatctgattctgctattggtatatattcatcatttcacttgttcatttattcacctaacaaaaatttgttacatgcttaaattttgcaaagctattaagtaaacagagacaggtacaacctgttttgctttcaaagaattttcactctaagagaatttagtgatctgcctaaagcaaaacatttataaattaaatctgtatacagttaattgaaggtaatagaaaaccccctgacaatttaaaaataaattgttaaacttgttgcttgatcttttatgtacatacttccaaataaatactaatttccatgcctttttcaggcataactctaataatgacatattcatattctaggtttgggttggtaccattgggtcaggccccaagggtcggaatctctgtgctaccttccagaatactgaaacatttgagttccaagatgaagtgggagcacttttgttatctgtgtgccagactgtgagccaaggaattttgtgtttcttgccatcttacaaggtaagggaatatttattgtttcttttgcctttaaataatcatttacattttaaacattggcatgctaattttaaaattaccacagtaagcttcctagggtagaggcaacaaggtaataactatagttttctaaacatcacatattattttacttattttttgattaagatactgcctgattgtcctacctctgttttacttaaaagtctgaaagagcaaggctggacgtggtggctcatgcttgtaatcccagcaggttgggaggctgagctgggaggatcacttgagcccaggagttcgagaccagcctggagaacatggtgaaactctgcctctacaaaatacaaaaattagctgggtgtggtggcacacacctatagtcccagctacctgcgaggctgaggtgggaggattgcttgagcccaggaggttgaggttacagtgagctatgattgcacccctgcactccagcgtgggcaacagaataagactctctctaa

SEQ ID NO: 240 - DNA, 1160 bp, Homo sapiens
cttagtaaaatgatcttaaatcatcttcatttgaagactatttaagaatattaagaaacttcaccttaggtttaaagagagaacttaaagtttgttaactttgacagaggttttttgttttttgcttttgcttttgaaattgccaagatagtagtagtagtagtagtagtggtggtggtggtagaaattgccaagataatagtagaagtagtagtagtaatagtagtagtagcagtagtagtggtagaaattgccaagataatagtagtagtagcagcagcagcagctaactgtgccagcaccattcagatctctctaaatctgttaataaatttaaccccataacagctctatgagatatattgttttcctcattttataaatgagaaaagacacagagagattaatatacttgccgtagtcacattggcttaaacaaatgaagttaagtttgtttagctagacacacaaaaaatcatttttttctttcccctctttagttattagaaaaattaaaagaacgttggctctctactggtttatggcataatctggagttggtgaagacagtcattgtagaaccacagggaggagaaaaaacaaattttgatgaattactgcaggtgtactatgacgcaatcaaatacaaaggagagaaaggtaactggaaattatttcatggtcggtgaaaaaatattttttattacaaagtaagaaggtacaattataattttatatttttagatgaattacacttaagagaaaaattataatcctgagtgaaaagaaaataaattgggtaaagaaattcttttaattgtacttgttctcctatgaatattttcacttgagtatgctgattcaactttaagaaaaacgatgccatcatctcacagtcttcagtgcactacctgaaatagtttgtgcaaaaaggcagttaggatatatataaatatattccttactagccaaatgagacctatattctgatgcatttagtacacttggtgcttgtattctattacataaggtaaacttgaattttcaaaacataactgaaaactcaattccaagttagagcatatccatgaagagtttgatgtgaggccgggcgtggtggctcttgcctgtaatcctagcgctttgggaggctgaggcgg

SEQ ID NO: 241 - DNA, 1122 bp, Homo sapiens
aagaaagaggtaatataacatatcagtatctttttatggtgtatatattatggtgttctctgtgtctgttttcaatacttttaaatatattgattccatatgatatgtattatcaattacaattatttcaattattctgagaattttactttcaggtggtaaaggtaataatgcaacttcaatttttattaaataaacctgtttataatcacacagttcatatgcaagttgctattctgacatgtttttactgtataagttatctggaagatgcagagtttgtaaattggtttgctacccttttgcatataaatgtaattttgttccccttatttacttaaagacattgaacttttaaaactttatctcataatagtgttttattttgattattttaaatttgctactgtaattactataattataaatcaggtattttcaaaatgacaagaataagcaatttctgagaattttggatatgcttttttctgttgtttaagatggagctctcctggtagcagtttgtcgtggtaaagtgagtgagggtctggatttctcagatgacaatgcccgtgctgtcataacaataggaattccttttccaaatgtgaaagatctacaggtaggccatcaaaaccttaagttttattattacaggagtcattggttttgtataaagttaattgcagggatccctcattttattgcgctttgcttttatagtgcttttttacaaattgaaggtttatggtaaccctgcattgtgcaagtctttcagcaccatttttccaacagcatgtggtcacttgtttctgtttcacatttgggttaattctcacgatatttcaaaccttttcattattattatactgttagggtaatctgtgataagtgatctttgatgttactattgtaattgttttggggcatctcatactgtacccacataagagagcaaacgtaattcataagtgatgtatgtattctaactgctccactgactacccttcccccatttctctctccttgggactctccattccctgagacacaacaatactgaaattaggccagttaataaccctacaatggccccagagtgttcaagtgaaaggaagtgtt

SEQ ID NO: 242 - DNA, 1113 bp, Homo sapiens
ttctaaaagtatattaaatgaaaaatgtcacaagtcattacatagtatatgataatatttatatgaaattctataaagggcaaaacagaaagcagatcagtggttgccagggccagcagtggaagaaagaaatttactataaagggataagagggaacttttgggggtgatgaaaatgttctatattatgatggtggttacattactatatatgtcaaaactcacctacttgtacactgaaaattgtgtggatttaatgaatgtaagttcaataaaactgcttgagatcacacagctgattagttatatgcattaggtaatttaaggaatgtgaagctaaataaaactattttaaatgaaacgaaaaaaatcagtactgaaaaacaaaataaaatctctaccctaaaaatatgtatattcaaactgttagaagttaatatgatgtttaaaatgagctttaattatctactaattttttaaatatattttaaaattattaggttgaactaaaacgacaatacaatgaccaccattcaaaattgagaggtcttctacctggccgtcagtggtatgaaattcaagcatacagggccttaaaccaggcccttggtaggtaagtggagtgaaatttaatataatattatctgtgacagggctatatatataaatctagtcttgctactttactctttataataaacttggtaaaattttatttaactggaaccataggaactggtatgtattcaatgatagctgtcacaagtagaatttgaaaagagtaagaagaataagttattcccaaaacaaaactcacaatttgctaaagtttaaagaaattttgtgattgatctaacaatgaatagcacacaaagatgctcagtaaatattaaagaaagcttatcaaatcaaaaaagttttgtcttgtgaacatcaaagctcagataacaattttatagataaacagacctctctcctcacctcccccaaaatgtcagggaagaaaattgatataccagccagtgtgaggagatattctatttgaaagtgtactttcagtacggaatctgtgtatctgttaaaatatcatcaaatagaaacaaaatctatttt

SEQ ID NO: 243 - DNA, 1083 bp, Homo sapiens
gaatgcaaggatgattcagtgtttgaaaatgaaccagtgtaatctaccatattaacagtcaaaagaagaaaaactacatgttatgtcaattgaattttagaatatttttgacaaaattaaatgtttattcatgatttaaaactctcatcaaactagtaaaaaggacctttacaattatttataatacttaaggtaaaaaaaagaaaacagtctatgtggctaagaaagatcttagaatatattttctataattttcttgagtgcaaaataaaatacaacattttggatgcaagttatctgtatttggaaaaagtagggaatttttaatacatctagtttgttacattgtgttggatagcttctgtaacttttctgataataacaaattgtttaaaggaatctataaaattgatttttttccaattttctgtctgtcccactggaaaactggatttatttccgatgttataattatttgactttttccctattttttctagatgtattagacacagaaatgattggggagctcttattctagtggatgatcgctttaggaataacccaagtcgctatatatctggtaagatctcagctgggcttagagtaaaaactagtaacaatcttcatatttttattgtggtgaaaaacacataacatgagctctactatcttattaagtgcacagtacaatattgttaactataagcacagtatttcacagcagatatctagaacttttaaatcttacataactgaaacttaacaccaactgaacagcaatgccccatgtccctctcccccctgtccactgacaaccaccgctatactttctgcttctattagtttgactgttttggatacctcatataaattgaattatgcagtatttgtccttctgtaactggcttatttcagttagcataatgtcctcaaggttcatctatgttgcaggatttccttcttttcaatgactgcttaatattttattttatgtatacattataccatattttctttatccattcatctgtcagtagacatttaggttgtttccccctcatggatattgggaacaatgct

SEQ ID NO: 244 - DNA, 1330 bp, Homo sapiens
cagaataattttaatttaagatatatttggaattggtggaggaagggaacaaaaaaacttgagactagaatcttgaaattatttttgcaaaaggagtaaaatttagaatattagaatggaaagttgtattgtttacaacttctagtttccctacaaaaaaaaaaggcaatttttgtggggaattatgatgaaattaaatttgccatgttcaccagttattcttaaccagagaatatgttttcccatctctgccctacttctactgcctctttgctctctccatttgacaattactgtatataaagagaatgttactcatatgttactgatacatatgtagtaaaattgctgaattgcagaaaaaacatatggagaaccattctgtatattcaaaatacaaattaggttacttcactagaaaaagcaagtgtattaccttagcatgtaatattttaataactaagtaaccaaattttccctgggtttacctttttctttaggactttctaaatgggtacggcagcagattcagcaccattcaacctttgaaagtgcactggaatccttggctgaattttccaaaaagcatcaaaaagttcttaatgtatccataaaggacagaaccaatatacaggacaatgagtctacacttgaagtgacctctttaaagtacagtacctcaccttatttactggaagcagcaagtcatctatcaccagaaaattttgtggaagatgaagcaaagatatgtgtccaggaactacagtgtcctaaaattattaccaaaaattcacctctaccaagtagcattatctccagaaaggagaaaagtatgaaaagttcttcccatttacctttgatagagaagtctttcattatatttagtgaaatgatatttatttgggtatagattaattccttaaatatggtggtttgtaatataaggtgttatcataaaatagtgaaacagtatggtgtactgtaatgggaacaaacttttgtcaggagaccagagcatattttctggttttccactaactggctttgccacttactagctttgtgatcatgagcaagtcatttgtcctttttgagtcgtaataggaaaaaaaaaatgcctgcctagctatcccttcaggttgggttgtaaaggtcaaaattataaatatcacagcattgtaaagtaccatgtaagtggtagatgttattctaaaggctatataaaaatttggcctaatttttatgtagatacttctatatgaactacttttcctatatagatagttcttatgaacttatttttaggaggtgagagacatttattttaagt

SEQ ID NO: 245 - DNA, 5955 bp, Homo sapiens
ccgattaacttggtaatcaggaaacctagtttctagtcttggtcttcttactaaccagttttataactttgagcaaataacttagccttatgtcactttccttatttattaaataaaagaattagtctaggtaagtttttctcagtcactggttagtggattttcaaggcaaatgtttacagcctgttccctcctttcctcagctcccttcctcttcccttttaccccttctttcctcattcattcttgagctccctgctgtggaatttgatagtttaccagacagcattataacttgggctaggaaacattagagacctaagatttctttcagagttaatattctgttccaagatgaaaatccactagtattcgttgggggctctaagttatgtatcctatacagttatttaggtatttctaataaataattattttaacctagcaattatgttagctaggagcagaaagttaaatctcttaaattcttgtattcttagatgatccagtattcctggaagaagcagggaaagcagaaaaaattgtgatttccagatccacaagcccaactttcaacaaacaaacaaagagagttagctggtcaagctttaattctttgggacagtattttactggtaaaataccgaaggcaacacctgagctcgggtcatcagagaatagtgcctctagtcctccccgtttcaaaacagagaagatggaaagtaaaactgttttgcccttcactgataaatgtgaatcctcaaatctgacagtaaacacatcgtttggatcatgccctcaatcagaaaccattatttcatcattaaagattgatgccacccttactagaaaaaatcattctgaacatccgctctgttctgaagaagccctggatccagacattgaattgtctctagtaagtgaagaagataaacagtccacttcaaatagagattttgaaacagaagcagaagatgaatctatctattttacacctgaactttatgatcctgaagatacagatgaagaaaaaaatgacctagctgaaactgatagaggaaatagattggctaacaattcagattgcattttagctaaagacctttttgaaattagaactataaaagaagtagattcagccagagaagtgaaagctgaggattgcatagatacaaagttgaatggaattctgcatattgaagaaagtaaaattgatgacattgatggtaatgtaaaaacaacttggataaatgaactggaactgggaaaaactcatgaaatagaaataaagaactttaaaccatctccttccaaaaataaaggcatgtttcctggttttaagtaataatacttaactctcaagctaagtaaaaatatgtcatcatgcttatgttaaactctgttgtaagtaataatttgtaaattgaataagtggcatactttttaaaaaactattttatgttcagaaatgtaaatgttattattcttgagtttttgggtttttttttttgagacagagtcttggtctgttgcccaggctggaatgcagtggtgtgctctgggctcactgcaaccttcacctccaggttcaagtgattctcctgcctcagccttctgagtagctgggactacaggtgtgcaccaccatgcccagctagtttttgtatttttagtagagatggggtttcaccatgttggccaggctggtctcgaactcctggcctcgtgatctgcccttctctgcctccctaagttgctgggattacaggtgtgagccacagtgcctggcccattcttgagttttgataaagtaattcatacaaagtactgtcctcaaataagtcttccttagctaaatgcaatttaaaattattcaaagatcctagggcacttctagtttcacgtaaatattcatattaggtggttctcttcatccatttgttttcacactgatacataaaaattaacagcagtctaatctagtgacacctcagtcatatttcgctatagattttacctcaaatcagtccaagactttttcagagatcaccatttgtcttgaaaggtttatttcgttattaaactgcctacttataagtaattaagagaaattaagaaagtagtatgcatttttaattgaaattgttttacattctttgtataataaacctaaaaccaaacatgtcataaacaaattgacgtaaagatataaaatgccaaatgaagtattccaaattttctattctaattatttagcttcaccatcattgtggaaaaaaatactagatcctgcttagtattatatatttttcctagtggatcagtgagtaataagtaccaaacactagactagaaggtaatttctacattgtttagaaagggtgaaacaatttatcccctctggtattgttctagcataagctttagttatacaatgattaagatagaaaacttcatatataaatttgataagcaaacccacatttatagctgcagctaaaatatgtttccttagggcacagtaatcctttctgtgaattttgaccttgtttgtgtttttgtgaatgaagctatatgtctaatcaaaaatgattataaaagaggctcatctctgacatcattccaaaaatacattcattgatctctttttaagaaacatctgttattcactgggcattgggactttttgtgagtaatttgaattgaaattttatgagctatccaagaattctgtatggtctattattttcaagtcaaaatttccagtaaggatttactttacatttcatttggataaatgaatcattatataggtatgtctttgcttccattttgagacatttagatttttacagcctgtttctatagcatttgatgttacaactctaagcgtagttcaaagacatttaaattgacaagttaccagttaaagaatttagaatatattagatcccatctagtattatatattttttctagttgatcattgagcagtaaataccaaatactcgattagaaggtaatttttacattgttttgaaagggtgaaacaatttatctcctctggtattattcttaaaccacagatagggatagtagggtagtgaaacgaataaatacctggtagaagacaagagacttgggctctacacctggctctgccactgatttgctaagtcatattggcaatcaccacacccttcagggaattagtttcatctgtaaaatgcagcggttagtactataaaatcatacaaatttctttgtgctttgagaatctataaaggaatgtctgttgatattctgagtcgattttcatttgcttttgttccagaacggttaaaataaagcatattatttcatttaaaaagtaaagtggctcttactcatttacatttagggaacgatggtgacgtggtttggctatgtccccagccagatctcatcttgaattgtagttcccataatcccgacgtgttgtgggaaggacccagtgggaggtaattgaatcgtgggggcggttaccctcatgcggttctcgtgatactgagttcttatgagacctgatgattttataaggagcttttccctgcttcactctcattcttctctcctgctgccctgtgaaaagttgccttccgccatgattgtaagtttcttgaggcctcctcagtcatgcagaactgtgagtcaattaaacctctttcctttataaattacccagtcttgggtatgactttattagcagcatgagaacagactgacacagatggtatatgtgcataataacttggaaagctagatatttattttcgcaatgctacaattaaaacattttgaggacttttaaaattacctttagggccaggcgcggtggctcacgcctgtaatcccagcactttgggaggccgaggcgggcggatcacgaggtcaggagatcgagaccatcctggttaacacggtgaaaccccgtctctactaaaaatacaaaaaattagccaggcgtggtggcgggcgcctgtagtcccagctactcaggaggctgaggcaggagaatggcgtgaacccgggaggtggagcttgcagtgagccgagattgcgccactgcactccagcctgggcgacagagcgggactccgtctcaaaaaaaaaaaaaaaaagaaattacctttagaattggtaaactacatgagaaaattaagcatattattcatatcttagtgttattacccaacttcatctccaatactttcccctttccctagctagatatgtttttgtttgtttgttttagacagtcttgctctgtcgctcaggctggagtgcaaaggcacgatcttggctcactgcaacctctgcctcgcaggttaaagcgattctcatgtctcagcctcctgcgtagctgggattacaggtgtacaccactgcacccagctaatttttttttttttttttttttaagtatcgacagggtttcaccatgttggccaggctggtctcaaactcctgacctcaagtgatctgcccacctcggcctcccaaagtgttgggattacaggcgtgagccaccatgcctggcctagatattttttattctttccaaaatttaattctccctgaagttaaaaattttcattactgagaatgtacatagagatgtgtcacaaccctttagtaattccaaaaggtgtttcaaaaattttatacaatgataatcactgttgaaacaggtgtatattctcctcagatcatgactgaccaagatgatattccaagaagtaaactactggcctttatagagtaggatgtaggccattttcattactgataacatacttttaaaagaaatgtttacagatttaaataagttaaaacatctaaatgcttttaaaagagcacctggcacattgcaagttattcattattaattagtagatgaatcatatatctggagtgcacccttgctctatatgaaagcttccctaactatagatatataggtgatagactgacaataaagatttgaggaaagaaaaattatttggctggcttattttttaagcttttgagatgtataaggtagagattgtttatcaaataatttatgtgacacattcaatgcatatgaaataattatctaatactgaatttattcaaggactgaaagtatatagagcacacaggctgcaaaccaggaaaactaccagttagagacagggctttattcttggaataaaggtacaatgtaaagagtagatgtttcatgacttgattaaattatttaaaactgtctagaattgtgttataaaactattactatgtttctatgcacttagttattacatgggtttaaatttggcactgtttctaagtttctataaggctttgttgttaagatctttctattcaaaacattaattttaacaaaaagcttttccccgttatttttctgcaactggacttttttgtattactttcctatattaaaacgcatttaaaatatttaattctttagggctgcttacaaaatttcatgaaatcaaagcacctgttgtcaaatcacttgaaaggctggttatcatggtcatctctaagtgatggcattcttttgtatttgattaccacacaattattctcgcatatgctcttttaaacgctgatttctcaatgagttacacaagaatttaacctttatgaattcttggtggtttattatctatttccataggtaaatgcagttaatcttttgtaaatagatagtattgatgataatcaaaaaaaattttaagaccagatcaagcaatgaatgtaagaaagctaaaaccttaacgtaaaataactgcagagctatgaaaaatacaataaagaacatcaggaaatagaaatttggaaaagtgaccaaggcttatgatcctctagccttaaacaattttcatgtctcaaaaaaaaaaaaaa

SEQ ID NO: 246 - DNA, 1500 bp, Homo sapiens
gcacccttgctctatatgaaagcttccctaactatagatatataggtgatagactgacaataaagatttgaggaaagaaaaattatttggctggcttattttttaagcttttgagatgtataaggtagagattgtttatcaaataatttatgtgacacattcaatgcatatgaaataattatctaatactgaatttattcaaggactgaaagtatatagagcacacaggctgcaaaccaggaaaactaccagttagagacagggctttattcttggaataaaggtacaatgtaaagagtagatgtttcatgacttgattaaattatttaaaactgtctagaattgtgttataaaactattactatgtttctatgcacttagttattacatgggtttaaatttggcactgtttctaagtttctataaggctttgttgttaagatctttctattcaaaacattaattttaacaaaaagcttttccccgttatttttctgcaactggacttttttgtattactttcctatattaaaacgcatttaaaatatttaattctttagggctgcttacaaaatttcatgaaatcaaagcacctgttgtcaaatcacttgaaaggctggttatcatggtcatctctaagtgatggcattcttttgtatttgattaccacacaattattctcgcatatgctcttttaaacgctgatttctcaatgagttacacaagaatttaacctttatgaattcttggtggtttattatctatttccataggtaaatgcagttaatcttttgtaaatagatagtattgatgataatcaaaaaaaattttaagaccagatcaagcaatgaatgtaagaaagctaaaaccttaacgtaaaataactgcagagctatgaaaaatacaataaagaacatcaggaaatagaaatttggaaaagtgaccaaggcttatgatcctctagccttaaacaattttcatgtctcaaaaaaaaaaaaaaagaattttgtttcttaagtttcatttgatagaaccattagctgcctggcttcctgtactccacaatggagccttgttataatatacatgggatctgagccagcagatcaccttattggtaagactaccttataatgaggtgctttcagtaactaaaccctcttggaccaggtccaaaacaacccatcttacaccaaattccactctgtaataaacaagcgtcaatgtattggaaagaaaacaaaagctatatgaaatttactgttcccagaaattaacctttgaaaacccaatggtaaatactgattaaaaggaatgtgtaacaaggcataattagatagatattttagtacattttataataactttgtattttcttggctcagtcttcctttattcgggaatttatattattttgattatcttaacgctttccccaaaatttcatcatttcacatgaaaatattttacattaatatttatagaattcaatattaaagt

SEQ ID NO: 247 - DNA, 4815 bp, Homo sapiens
agtggcgtcggaactgcaaagcacctgtgagcttgcggaagtcagttcagactccagcccgctccagcccggcccgacccgaccgcacccggcgcctgccctcgctcggcgtccccggccagccatgggcccttggagccgcagcctctcggcgctgctgctgctgctgcaggtctcctcttggctctgccaggagccggagccctgccaccctggctttgacgccgagagctacacgttcacggtgccccggcgccacctggagagaggccgcgtcctgggcagagtgaattttgaagattgcaccggtcgacaaaggacagcctatttttccctcgacacccgattcaaagtgggcacagatggtgtgattacagtcaaaaggcctctacggtttcataacccacagatccatttcttggtctacgcctgggactccacctacagaaagttttccaccaaagtcacgctgaatacagtggggcaccaccaccgccccccgccccatcaggcctccgtttctggaatccaagcagaattgctcacatttcccaactcctctcctggcctcagaagacagaagagagactgggttattcctcccatcagctgcccagaaaatgaaaaaggcccatttcctaaaaacctggttcagatcaaatccaacaaagacaaagaaggcaaggttttctacagcatcactggccaaggagctgacacaccccctgttggtgtctttattattgaaagagaaacaggatggctgaaggtgacagagcctctggatagagaacgcattgccacatacactctcttctctcacgctgtgtcatccaacgggaatgcagttgaggatccaatggagattttgatcacggtaaccgatcagaatgacaacaagcccgaattcacccaggaggtctttaaggggtctgtcatggaaggtgctcttccaggaacctctgtgatggaggtcacagccacagacgcggacgatgatgtgaacacctacaatgccgccatcgcttacaccatcctcagccaagatcctgagctccctgacaaaaatatgttcaccattaacaggaacacaggagtcatcagtgtggtcaccactgggctggaccgagagagtttccctacgtataccctggtggttcaagctgctgaccttcaaggtgaggggttaagcacaacagcaacagctgtgatcacagtcactgacaccaacgataatcctccgatcttcaatcccaccacgtacaagggtcaggtgcctgagaacgaggctaacgtcgtaatcaccacactgaaagtgactgatgctgatgcccccaataccccagcgtgggaggctgtatacaccatattgaatgatgatggtggacaatttgtcgtcaccacaaatccagtgaacaacgatggcattttgaaaacagcaaagggcttggattttgaggccaagcagcagtacattctacacgtagcagtgacgaatgtggtaccttttgaggtctctctcaccacctccacagccaccgtcaccgtggatgtgctggatgtgaatgaagcccccatctttgtgcctcctgaaaagagagtggaagtgtccgaggactttggcgtgggccaggaaatcacatcctacactgcccaggagccagacacatttatggaacagaaaataacatatcggatttggagagacactgccaactggctggagattaatccggacactggtgccatttccactcgggctgagctggacagggaggattttgagcacgtgaagaacagcacgtacacagccctaatcatagctacagacaatggttctccagttgctactggaacagggacacttctgctgatcctgtctgatgtgaatgacaacgcccccataccagaacctcgaactatattcttctgtgagaggaatccaaagcctcaggtcataaacatcattgatgcagaccttcctcccaatacatctcccttcacagcagaactaacacacggggcgagtgccaactggaccattcagtacaacgacccaacccaagaatctatcattttgaagccaaagatggccttagaggtgggtgactacaaaatcaatctcaagctcatggataaccagaataaagaccaagtgaccaccttagaggtcagcgtgtgtgactgtgaaggggccgctggcgtctgtaggaaggcacagcctgtcgaagcaggattgcaaattcctgccattctggggattcttggaggaattcttgctttgctaattctgattctgctgctcttgctgtttcttcggaggagagcggtggtcaaagagcccttactgcccccagaggatgacacccgggacaacgtttattactatgatgaagaaggaggcggagaagaggaccaggactttgacttgagccagctgcacaggggcctggacgctcggcctgaagtgactcgtaacgacgttgcaccaaccctcatgagtgtcccccggtatcttccccgccctgccaatcccgatgaaattggaaattttattgatgaaaatctgaaagcggctgatactgaccccacagccccgccttatgattctctgctcgtgtttgactatgaaggaagcggttccgaagctgctagtctgagctccctgaactcctcagagtcagacaaagaccaggactatgactacttgaacgaatggggcaatcgcttcaagaagctggctgacatgtacggaggcggcgaggacgactaggggactcgagagaggcgggccccagacccatgtgctgggaaatgcagaaatcacgttgctggtggtttttcagctcccttcccttgagatgagtttctggggaaaaaaaagagactggttagtgatgcagttagtatagctttatactctctccactttatagctctaataagtttgtgttagaaaagtttcgacttatttcttaaagcttttttttttttcccatcactctttacatggtggtgatgtccaaaagatacccaaattttaatattccagaagaacaactttagcatcagaaggttcacccagcaccttgcagattttcttaaggaattttgtctcacttttaaaaagaaggggagaagtcagctactctagttctgttgttttgtgtatataattttttaaaaaaaatttgtgtgcttctgctcattactacactggtgtgtccctctgccttttttttttttttaagacagggtctcattctatcggccaggctggagtgcagtggtgcaatcacagctcactgcagccttgtcctcccaggctcaagctatccttgcacctcagcctcccaagtagctgggaccacaggcatgcaccactacgcatgactaattttttaaatatttgagacggggtctccctgtgttacccaggctggtctcaaactcctgggctcaagtgatcctcccatcttggcctcccagagtattgggattacagacatgagccactgcacctgcccagctccccaactccctgccattttttaagagacagtttcgctccatcgcccaggcctgggatgcagtgatgtgatcatagctcactgtaacctcaaactctggggctcaagcagttctcccaccagcctcctttttatttttttgtacagatggggtcttgctatgttgcccaagctggtcttaaactcctggcctcaagcaatccttctgccttggccccccaaagtgctgggattgtgggcatgagctgctgtgcccagcctccatgttttaatatcaactctcactcctgaattcagttgctttgcccaagataggagttctctgatgcagaaattattgggctcttttagggtaagaagtttgtgtctttgtctggccacatcttgactaggtattgtctactctgaagacctttaatggcttccctctttcatctcctgagtatgtaacttgcaatgggcagctatccagtgacttgttctgagtaagtgtgttcattaatgtttatttagctctgaagcaagagtgatatactccaggacttagaatagtgcctaaagtgctgcagccaaagacagagcggaactatgaaaagtgggcttggagatggcaggagagcttgtcattgagcctggcaatttagcaaactgatgctgaggatgattgaggtgggtctacctcatctctgaaaattctggaaggaatggaggagtctcaacatgtgtttctgacacaagatccgtggtttgtactcaaagcccagaatccccaagtgcctgcttttgatgatgtctacagaaaatgctggctgagctgaacacatttgcccaattccaggtgtgcacagaaaaccgagaatattcaaaattccaaatttttttcttaggagcaagaagaaaatgtggccctaaagggggttagttgaggggtagggggtagtgaggatcttgatttggatctctttttatttaaatgtgaatttcaacttttgacaatcaaagaaaagacttttgttgaaatagctttactgtttctcaagtgttttggagaaaaaaatcaaccctgcaatcactttttggaattgtcttgatttttcggcagttcaagctatatcgaatatagttctgtgtagagaatgtcactgtagttttgagtgtatacatgtgtgggtgctgataattgtgtattttctttgggggtggaaaaggaaaacaattcaagctgagaaaagtattctcaaagatgcatttttataaattttattaaacaattttgttaaaccat

SEQ ID NO: 248 - DNA, 1500 bp, Homo sapiens
attaggccgctcgaggcagagtgcagtggctcacgcctgtaatccaacacttcaggaggctgaagagggtggatcacctgaggtcaggagttccagaccagcctggccaacatggtgaaaccccgtctgtactaaaaatacaaaattagccggtgtggtggcacacgcctgtagtcccagctactcaataggctgagacaggagagtctcttgaacccggcaggcggaggttgcagtgagccgagatcgtgccactgcactccagcctgggcaagacagagcgagactccgtctcaaaaaatacaaacaaaacaaacaaacaaaaaattaggctgctagctcagtggctcatggctcacacctgaaatcctagcactttgggaggccaaggcaggaggatcgcttcagcccaggagttcgagaccaggctgggcaatacagggagacacagcgcccccactgcccctgtccgccccgacttgtctctctacaaaaaggcaaaagaaaaaaaaattagcctggcgtggtggtgtgcacctgtactcccagctactagagaggctggggccagaggaccgcttgagcccaggagttcgaggctgcagtgagctgtgatcgcaccactgcactccagcttgggtgaaagagtgagaccccatctccaaaacgaacaaacaaaaaatcccaaaaaacaaaagaactcagccaagtgtaaaagccctttctgatcccaggtcttagtgagccaccggcggggctgggattcgaacccagtggaatcagaaccgtgcaggtcccataacccacctagaccctagcaactccaggctagagggtcaccgcgtctatgcgaggccgggtgggcgggccgtcagctccgccctggggaggggtccgcgctgctgattggctgtggccggcaggtgaaccctcagccaatcagcggtacggggggcggtgcctccggggctcacctggctgcagccacgcaccccctctcagtggcgtcggaactgcaaagcacctgtgagcttgcggaagtcagttcagactccagcccgctccagcccggcccgacccgaccgcacccggcgcctgccctcgctcggcgtccccggccagccatgggcccttggagccgcagcctctcggcgctgctgctgctgctgcaggtaccccggatcccctgacttgcgagggacgcattcgggccgcaagctccgcgccccagccctgcgccccttcctctcccgtcgtcaccgcttcccttcttccaagaaagttcgggtcctgaggagcggagcggcctggaagcctcgcgcgctccggaccccccagtgatgggagtggggggtgggtggtgaggggcgagcgcggctttcctgccccctccagcgcagaccgaggcgggggcgtctggccgcggagtccgcggggtgggctcgcgcgggcggtgggggcgtgaagcggggtgtagggggtggggtgtggagaaggggt

SEQ ID NO: 249 - DNA, 1172 bp, Homo sapiens
aaagaaaaaaaaattagcctggcgtggtggtgtgcacctgtactcccagctactagagaggctggggccagaggaccgcttgagcccaggagttcgaggctgcagtgagctgtgatcgcaccactgcactccagcttgggtgaaagagtgagaccccatctccaaaacgaacaaacaaaaaatcccaaaaaacaaaagaactcagccaagtgtaaaagccctttctgatcccaggtcttagtgagccaccggcggggctgggattcgaacccagtggaatcagaaccgtgcaggtcccataacccacctagaccctagcaactccaggctagagggtcaccgcgtctatgcgaggccgggtgggcgggccgtcagctccgccctggggaggggtccgcgctgctgattggctgtggccggcaggtgaaccctcagccaatcagcggtacggggggcggtgcctccggggctcacctggctgcagccacgcaccccctctcagtggcgtcggaactgcaaagcacctgtgagcttgcggaagtcagttcagactccagcccgctccagcccggcccgacccgaccgcacccggcgcctgccctcgctcggcgtccccggccagccatgggcccttggagccgcagcctctcggcgctgctgctgctgctgcaggtaccccggatcccctgacttgcgagggacgcattcgggccgcaagctccgcgccccagccctgcgccccttcctctcccgtcgtcaccgcttcccttcttccaagaaagttcgggtcctgaggagcggagcggcctggaagcctcgcgcgctccggaccccccagtgatgggagtggggggtgggtggtgaggggcgagcgcggctttcctgccccctccagcgcagaccgaggcgggggcgtctggccgcggagtccgcggggtgggctcgcgcgggcggtgggggcgtgaagcggggtgtagggggtggggtgtggagaaggggtgccctggtgcaagtcgagggggagccaggagtcgtggggacgatcttcgagggaaggagaggggcatccgtagaaataaaggcacctgccatgccaagaaaggtcgtaaataggagtgagggtcccggggataagaaagtgaggtcggaggaggtgggagcgcccctcgctc

SEQ ID NO: 250 - DNA, 1115 bp, Homo sapiens
ggtgcaagtcgagggggagccaggagtcgtggggacgatcttcgagggaaggagaggggcatccgtagaaataaaggcacctgccatgccaagaaaggtcgtaaataggagtgagggtcccggggataagaaagtgaggtcggaggaggtgggagcgcccctcgctctgaggagtggtgcattcccggtctaaggaaagtggggtactggagaataaagacatctccaataaaatgagaaaggagactgaaagggaacggtgggctaggtcttgagggggtgactcggcggccccctcccgggagttcctgggggctcggcggccgtaggtttcggggtgggggagggtgacgtcgctgcccgcccgtcccggggctgcgggctggggtcctcccccaatcccgacgccgggagcgagggaggggcggcgctgttggtttcggtgagcaggagggaaccctccgagtcacccggttccatctacctttcccccaccccaggtctcctcttggctctgccaggagccggagccctgccaccctggctttgacgccgagagctacacgttcacggtgccccggcgccacctggagagaggccgcgtcctgggcagaggtgagggcgcgctgccggtgtccctgggcggagtagggaggggttggaaaggggccgagaaattgcactcccacacccctgggttgcaatgggcaagctccctccttggctcaaacgacaccccttggaatttacgcagatttggggatccaaacgtttacgactgaacactgtggtggagggggtaaccctgcctggttgttgactatgttataaagaagaggaggttgagggcacttactagaagccttcgtatttctcttattgccctcagcactgtagagacagtctctcatttcagactgcaaaaacctggtgggtgggaaggcctggcaggagtattcccgttttacagttgagcaaaccgaggctaagagagtgacgtccacttgctcagggtcagcagagcagatatctgaactgggatctgactcccaggccccattaagcaccatctctgggatgactgaagagcagccctctcttggttactgggctgt

SEQ ID NO: 251 - DNA, 1224 bp, Homo sapiens
ggcgcaatctcagctcactgcaacctccaccttacaggttcaagagattctcctgcctcagcctcccaagtggctgcaattacaggcgcctgccactaaacctggctaatttttttttgtatttttagtagagacagggtttcatcatgttggccaggctggtctcaagctcctgacctcaagtgatctgcccaccttggcctcccaaaatgctggggttacaggcatgagacactgtgcccagtcgagaagttactttctagacaagataatattttcaattgacaagaagatgagaaagaaatcagagcacaaggaagtcatcctgtagttgtgaagaacattatggtgatagctttgttgttctgtcaccagattatggtttgttttggttgtgtttggttttgtgggagtcttcccacaagttcgctctttggagaaggaatgctcttgtctttaatctgtccaatttcctaatctctgtgatttctgccctgcagtgaattttgaagattgcaccggtcgacaaaggacagcctatttttccctcgacacccgattcaaagtgggcacagatggtgtgattacagtcaaaaggcctctacggtttcataacccacagatccatttcttggtctacgcctgggactccacctacagaaagttttccaccaaagtcacgctgaatacagtggggcaccaccaccgccccccgccccatcaggtatgttggcatttttctgagaagttcgctgttgttttagtgcgctgtctaatccaggtttctcagccttggtaccgttgacattttgggctggatgattttgtgttgtaggggttgtcctgtgcactgtgtaggatgtttagcaagcatccctggccttaactggttagacaccagtagcacttccaccagttatgacaacccaaagtatctccacatgttgcccatggcccctggggggacaaatcagcccaagttgagggctcttggcctaactgaataattcttgctggagtttttggggtgtggggatcgggtagtgtagaagagtggtaaaggcctgaacaccgtctgggactgaatctcagccgtgctatttactacttgggtaatgttggaggaattacgtcacctgtctatgcttgagcttccttatctgtaaaatggagataacagtgaggatggaattaattaatacatgtgaaatgctaaaaatacgc

SEQ ID NO: 252 - DNA, 1144 bp, Homo sapiens
tagtcagccatggtggtgcacacctgtagtcccagctactcaggaggctgagatgggagggatggcttgagcctgggaggcagaggttccagtgagacaagatcttgccgctgtaccccagcctcagtgatagagccagatcttgtctcaaaaaaataaaaatgagattatgtaggcttgaaacagcttgtaaattataatatcaaaccctgaaaccaatacttgtgtatgcatgatgattatttgagctctggacactaagaaggataaaaagagaatgcagtctttacgatatagcaaagggtctcattggtttttgttttgattggtcattttggtggatatatataatttgtcattgataagagaatgtgtcattaaattcaaactgtacactgcccacagaaggctggggacgctgtctggctaggttggactgttagacctgaagtatccgtcttgaattgtcttatcttgttcctcatcttctttccttttaggcctccgtttctggaatccaagcagaattgctcacatttcccaactcctctcctggcctcagaagacagaagagagactgggttattcctcccatcagctgcccagaaaatgaaaaaggcccatttcctaaaaacctggttcaggtagagaaagaagttctctgtttctctgggagggatttggcagagaagtaccaaggagagaaagggaaaagacccagtgttgggatccttctttactaattctttttctttcattttgtcttcagatcaaatccaacaaagacaaagaaggcaaggttttctacagcatcactggccaaggagctgacacaccccctgttggtgtctttattattgaaagagaaacaggatggctgaaggtgacagagcctctggatagagaacgcattgccacatacactgtaagtatctcttagaagcttgttgacaccggggtaacatccacccaggattttttggtcaacccatgctggatccgcagatcagaggctctgaacacatgaggagcttaacttgacacctcttgacctgttgctaaggagaagtgatgggagaacgtgggacagtttggggttgttaatttttctccttgtcaggaagaaaggaaggagaatccgcat

SEQ ID NO: 253 - DNA, 1156 bp, Homo sapiens
aaaagagaatgcagtctttacgatatagcaaagggtctcattggtttttgttttgattggtcattttggtggatatatataatttgtcattgataagagaatgtgtcattaaattcaaactgtacactgcccacagaaggctggggacgctgtctggctaggttggactgttagacctgaagtatccgtcttgaattgtcttatcttgttcctcatcttctttccttttaggcctccgtttctggaatccaagcagaattgctcacatttcccaactcctctcctggcctcagaagacagaagagagactgggttattcctcccatcagctgcccagaaaatgaaaaaggcccatttcctaaaaacctggttcaggtagagaaagaagttctctgtttctctgggagggatttggcagagaagtaccaaggagagaaagggaaaagacccagtgttgggatccttctttactaattctttttctttcattttgtcttcagatcaaatccaacaaagacaaagaaggcaaggttttctacagcatcactggccaaggagctgacacaccccctgttggtgtctttattattgaaagagaaacaggatggctgaaggtgacagagcctctggatagagaacgcattgccacatacactgtaagtatctcttagaagcttgttgacaccggggtaacatccacccaggattttttggtcaacccatgctggatccgcagatcagaggctctgaacacatgaggagcttaacttgacacctcttgacctgttgctaaggagaagtgatgggagaacgtgggacagtttggggttgttaatttttctccttgtcaggaagaaaggaaggagaatccgcatgcatcctcatacaaccaggacaaatttagacccaagatgtcaacctgttcttggggctggaagtccctgacctaaaggaacaggacagtgatgatataagggagcaaaacccatttcttgggcttggcagcagcaagagcttaggaaaaccaagaggtcttttttttttttttttgagatagggtttcactctgtcacccaggctggaaccacaacctccacttcccgggttcaagtgattctcctgcttcaacctcccgagtagctggattataggcagc

SEQ ID NO: 254 - DNA, 1145 bp, Homo sapiens
tgtattttttgtagaaacaagatcttgctatgttgcccaggctggtcttgaaatcttgagctcaagcaatctgcccacctcggcctcccaaagtgctgagattacatgaaccactatgcctggccaggaagtcatatattgatgccaaattcagaaatatctgggggaaatgctagactaaaaggaccagagcaagtttcacccggcatggaataagagtttttcaggcccgcatcttcatctctaggcctgatgccctggtcctcgtgtgggaaatgggaggtctgagccgtggggggtgttctccagcccatggctcttaccttgttataatctcactgaagcagcagcagcacatgtgtgagaaaagtcacccactgggggtctcagagcctaggaaggtgtggcagccaggggggcgcactctgctctggctgggccccttctcccatgttttcttcctcatcagagctcaagtcaccctcacttggttctttcagctcttctctcacgctgtgtcatccaacgggaatgcagttgaggatccaatggagattttgatcacggtaaccgatcagaatgacaacaagcccgaattcacccaggaggtctttaaggggtctgtcatggaaggtgctcttccaggtatatccactaatgagaatctgaatactcagaaagactcttaggttctttggaccccaaagtgttgtccaagcccaaaggttgtgtaactaaagctgatccttcctacggacagaacttcttggcaagccattgttgtgttatatgcatgtgtgtaacagtctacctgtggaaacatataaaatagggagagtttaagaacaatcttcccttttttattattaattttttttttttttaggctgggcatggtggctcatgcctgtaatcccagcactttgggaggccaaggtggatgggtcacctgtgctcaggagttcaagaccagcctgaccaacatggtgaaacctcgtctctattaaaaatacaaaaaaattagccggtcgtggtggcgggggcctgtaatcccagctacttgggaggctgaggcaggagaattgcttgaacccgggaggcgggggttgcagtaagctgagatcacgccactgcactccagcctg

SEQ ID NO: 255 - DNA, 1176 bp, Homo sapiens
ggtcaggagtttgagaccagcctgaccaacatggagaaaccctgtctctactaaaaatagaaaattagctgggcgtggcgacgcatgcctataattccagatacttgggaggctgaagcaggagaattgcttgaacccgggagacagagattgtggtgagccgaatcacgccattgcattccagcctgggcaacaggagcaaaactccgtctcaaaaaaaaaaaaaaaaaaaaagataaccacaccctgacttttgtggtaatcattccctttcttttctttattaccatttgtgtatttatacctggataataagttgatagtttgagctttctttctcccctagcactttggtaagaattctaggaattagggaactctgacacggtaccacccccatgtcccctcctttatccctcagggcagaattggattaagcagtattgacccagtcccaaagtgcagcttgtctaaaccttcatctccttgaactcttccaggaacctctgtgatggaggtcacagccacagacgcggacgatgatgtgaacacctacaatgccgccatcgcttacaccatcctcagccaagatcctgagctccctgacaaaaatatgttcaccattaacaggaacacaggagtcatcagtgtggtcaccactgggctggaccgagaggtcaggggtcaggaggatccagagggtgtggaggacaaatgtgtattagctcaatcccgtggacaaagcaaaatcctgctaggccagttgtcagttaatacagtgatggtctaagctttgcatctaagcttgtgcccagaggttccgtgcctagaagacaggcaggctggcatgaagcacatggttaaatattctggttccatgtgttgggctgggctaggccaaaggtggctagtgttcctggtcctgacttggttgtgtcgatctctctgcagagtttccctacgtataccctggtggttcaagctgctgaccttcaaggtgaggggttaagcacaacagcaacagctgtgatcacagtcactgacaccaacgataatcctccgatcttcaatcccaccacggtaattctataactccttagagggtttccaaagaaaggtcttttgttgttcatgaactaagtgtcaccactgctcatgggcgaagtctttgaaaac

SEQ ID NO: 256 - DNA, 1129 bp, Homo sapiens
gtcccaaagtgcagcttgtctaaaccttcatctccttgaactcttccaggaacctctgtgatggaggtcacagccacagacgcggacgatgatgtgaacacctacaatgccgccatcgcttacaccatcctcagccaagatcctgagctccctgacaaaaatatgttcaccattaacaggaacacaggagtcatcagtgtggtcaccactgggctggaccgagaggtcaggggtcaggaggatccagagggtgtggaggacaaatgtgtattagctcaatcccgtggacaaagcaaaatcctgctaggccagttgtcagttaatacagtgatggtctaagctttgcatctaagcttgtgcccagaggttccgtgcctagaagacaggcaggctggcatgaagcacatggttaaatattctggttccatgtgttgggctgggctaggccaaaggtggctagtgttcctggtcctgacttggttgtgtcgatctctctgcagagtttccctacgtataccctggtggttcaagctgctgaccttcaaggtgaggggttaagcacaacagcaacagctgtgatcacagtcactgacaccaacgataatcctccgatcttcaatcccaccacggtaattctataactccttagagggtttccaaagaaaggtcttttgttgttcatgaactaagtgtcaccactgctcatgggcgaagtctttgaaaactctctccagactagagaatgttaactttaaacttaaaagcaagcatcttgagatggcagttgtcttttagtatcttttttccacccttggcctggggccaattggtgcaagattgtgaagttgcaaaaagcacctactgatttcatagtctcatggtacatttttatagcaaatattacctggtttcatttctttattgaacaaatattttctaagtttatattaggcactgtgttagacactggagagaccatcacacacaaagattccattctcatggtgtttctggtatagccaggaagacatcttatgagaattattgtatgccaaggatattacatgcattcaaggagaaggtattgagaaccaagtagggtaagtttaaatcatcctgtataatggcc

SEQ ID NO: 257 - DNA, 1183 bp, Homo sapiens
ggtggatcccttgaggatggagtttgagaccagcctggccaacgtggcgaaactccatctccactaaaaatacaaaaattagctgggcgtggtggtgcatgcttgtaatcccagctactcgggcatctgaggcatgagagttgcttgaacccaggaggcggaggctgcagtgagccgagattgtaccattgcaccccagtgcgcccattgcctggcctctccttgtcacatcttctccttgaagcttgctttcagttagccaggtgtggtggtgcatgcctgtggtcccagctactctggaggctgaggtgggaggattgcttgagcccaggaggttgaggctacagtgagccatgatcgctcaaatacactccagcctggtgacagtgagatcttatctcaaaagaacaacaaaaaaagaggaatcctttagccccctgagactcagctctgctagcagtcttggtactttgtaaatgacacatctctttgctctgcagtacaagggtcaggtgcctgagaacgaggctaacgtcgtaatcaccacactgaaagtgactgatgctgatgcccccaataccccagcgtgggaggctgtatacaccatattgaatgatgatggtggacaatttgtcgtcaccacaaatccagtgaacaacgatggcattttgaaaacagcaaaggtttgtatggtacctggcaagatgcagaaactggcatcctcacagctgttcatacccttgtcccctggtatcttcttagaagtagattcgctttggcagggggacagggtgactttcccagattgtagtggaccatgtgggatttgcagtggctcttcctgctcatgtaagaaatcaagaaactgtgctgtgtgtggtggctcacgcctgtaatcccagcacttagggacgctgaggcaggcagatcacgaggtcaggagtttgagtctctgctaaaaatacaaaaattagccaggcatggtggcacgtgcctgtaatctcagctactagggaggctgaggcaggagaattgcttgaacctgggaggtggaggttgcagtgagccaagatcgtgccattgcactccagctctgggtgacagagcaagactcagtctccaggggtgggcggggaaaaggaggccgggcgtggtggctcacgcctgtaatcatagcactttg

SEQ ID NO: 258 - DNA, 1245 bp, Homo sapiens
caggagttcgagaccagcctggccaacatggtgaaacgtcgtctctactaaaaatacaaaaaattagccaggtgtggtggcgggctcctgtaatcccagctactagggaggctgaggcaggagaattgcttgaacccaggaggtggaggttgcagtgagccattgcattccagcctgggtgacaagagcaaaaattctgtctcagaaaaaaataaaataaggaaagaaacttgaaaactaagaatttgagtgaattgcttgttgaagtgactggatccctagaatagccccagctttgccttcctcttgagtaggtgagcagatttgagaagccatggtaagtaattgtggtttctgccattgaaagtcatggcagaaaccacagttacttttgcaccaacctaatatattaccaaaagcaacagttaaggatttaattttatttttactaacacaaaatgtttcgttttgtttttaacttcattgtttctgctctctagggcttggattttgaggccaagcagcagtacattctacacgtagcagtgacgaatgtggtaccttttgaggtctctctcaccacctccacagccaccgtcaccgtggatgtgctggatgtgaatgaagcccccatctttgtgcctcctgaaaagagagtggaagtgtccgaggactttggcgtgggccaggaaatcacatcctacactgcccaggagccagacacatttatggaacagaaaataacgtaagtgtgaggatttttcaactgacttgcagcaactggttattttatatcattttatatgtaaatcaataatatgtacttcatggcattttgtcatttgtctgtacaagaccattctcttaatttattttttattccctttatctgtgctcctttcacctgttcccttcccttcacagacagccgttcttggtctgatgtgctgcctctctttgagctcttgtagtatggtagaaatgcaattttactttgcatacatactattgtgtttttttgagtttggagtctcactttgtcgcccaggctagcgtgcagtggcgtgatctctgcctactgcagcctctgtctcttgggttcaagcaattttcatgcctcagccttccatgtagccaggattacaggtgcctgccaccacgcccggctaatttttgtatttttagtagagacaaggcttcaccacattggccaggctggtctcgaacttctgacctcaagtgatc

SEQ ID NO: 259 - DNA, 1146 bp, Homo sapiens
gtggagcttgcagcgagccgacatcgcgccactgcactccagcttgggctacagagcaagactccgtctcaaaaaaaaaaaaaaaaaaaaagaaagaaagggtttcacttttgttgcccaggctggagtgcagtggtgcaatctcggctcactgcaacctccatctcccaggttcaaacgattctcctgcctcaccctccccagtagctgggattacaggcgtgtgccaccacacccagctaatttttgtatttttagtagagacagggtttcaccatgttgaccaggctggtctcaaacccctgacctcaggtgatctgcccacctcagcctcccaaagtgttgggattacaggcatgagccaccgcgaccggcctattgttggttttcaaaataaaaacgttggaagtaaccatataactgaagaagcgcttaagccgttttcagctacatgttgtttgctggtcctattctaaaagccagagcttgtccccgttcagatatcggatttggagagacactgccaactggctggagattaatccggacactggtgccatttccactcgggctgagctggacagggaggattttgagcacgtgaagaacagcacgtacacagccctaatcatagctacagacaatggtaagggggcctcatctgagcctttgctgcctcgacctcctagctagttcagttccttgcccctcccttcttttggagggaagagttcattctttttcttttatcctttttgtttgctggattgatttgtataaatgtatggagtacaagggtaattttgttacatgcatagatgtgtagtggtaaagtcagggcttttagggtatccgtcacccaaataacatgcattgtacccattaagtaattgttcatcatctaccccctcccaccccttggacccttcccagctgccattgtctatcattccacaatctacatccatgtgtacacattatcgaactccgacttctaagtgagaacatgcagtatttctccttatatgtctgattcgtttcacttgagacaatggcctccagtttcatccatgttgctgcaaaagatttctcttttattcttaaacaaaggcattcttattatcaaaaattcaagtgggctgggca

SEQ ID NO: 260 - DNA, 1225 bp, Homo sapiens
ccaatctattttgaaaaccaatttgcagagacttcaaaagacccaactcatcccctttgattttaagcttctagtcaggcttaaaattaaaataaataaaaagactcaatgctttgttaatgacctcaaatggcaggaaagtgcagaaaaaggagaactagggaaacaacaggcaggcaataggacttcttggagtagttaaaattcagtgaatgaataacgatatgtgaagaaggaggagtgtgttcttggtgtgaggaataacttgaataattgttatcaaggtgggaataagttgtctgtgtaaaacggccagagacctgcccacctgggagtggaggtcctttgggattggtgggacaggaggttctgcgggtggagtggggcctggtgagggaccactgaagagccaggacaagatctagacttggtctggtggaaggcaatggggattcattactgttgccaagctgccacattttctgtgtattttctcttaggttctccagttgctactggaacagggacacttctgctgatcctgtctgatgtgaatgacaacgcccccataccagaacctcgaactatattcttctgtgagaggaatccaaagcctcaggtcataaacatcattgatgcagaccttcctcccaatacatctcccttcacagcagaactaacacacggggcgagtgccaactggaccattcagtacaacgacccaagtgggtacctgagttttattttggcaactttgctccaactgccatgcttcccttcccccagatccccacctttcaatttcccttctcaacttctagatgtcaccccttccattgatacttgcttccttgtcccttctgtctttgaggccttgctccaaaggtctttttcctttcctggtatctaactttgtagcatgctacccagtaatctaaaacccaagcagggctccctctcccagcctctagccaccctccactcccctctccacttgcaaccaggaccatcttctctgctacctcctgctcctgggaccaaacaacaccatttttgtggttagctccttcttgccaaccaatcgtgagctcccagattcatcagaactattctaccgaggtggaggcagctgtcaactgcctggtcaatttgcatatatgggcttcctacacctacttctctctgggcttctatttccaccatgacgatgtggatctggaaggtg

SEQ ID NO: 261 - DNA, 1228 bp, Homo sapiens
aacctgaactggacccttttggatcttcatgccttgggttccacctgcacagacccccatatctgtgacttcctggagagccacttcctagatgaaaaagtaaaactcatcaagaagataggtgaccacctgaccaaccttcacaggccagccggcctccaggccgggctgggcaaaaaggttcaccctcaggcacacgggagcctaccgaacccagcgacatctgaagagccccgctctgcctaagcctctccctccagccactaggcagcttttttaaaccaactctagagccctctcccaagccttagaccaaatggaaataaagctttttacagcaaaaaaaaaaaaaaaaaagtacatacctaaataaaacccaagcagctctgctctcttcactcggcttgcgggtgtctttagttcactagcaattttattctggaatgagctttttattttcctcccctggtctcatcatttctttttattgctttctccagcccaagaatctatcattttgaagccaaagatggccttagaggtgggtgactacaaaatcaatctcaagctcatggataaccagaataaagaccaagtgaccaccttagaggtcagcgtgtgtgactgtgaaggggccgctggcgtctgtaggaaggcacagcctgtcgaagcaggattgcaaattcctgccattctggggattcttggaggaattcttgctttgctaagtaagtccagctggcaagtgactcagcctttgacttaaaaaaatggaggaggtttatttcctggaaatgatttttgttcttatattaataaggatataggttagctgatgtgggaaagagactcccaagttatgccagcctccataaaatagaagtttgtctcttactgaacatttcagaggtaaatggtctaagatgggaaggccatgaagtcaacaggggacccaggtttcttctaccttgtctcttttcattcttcaagacagtgcatcccaagcttgagagcatacaaatcatctgggcctctttttgaactgggaaatctgatccaggaggtctggcatagggccacagattctgcatttcttttttttttttttttttttttgagatggagtttcgctcttgttgccgaggctggagtgcaatggtgtgatctcagctcactgcaccctctgcttaacaggttcaagcgattctcccgcctcagcctcctgagt

SEQ ID NO: 262 - DNA, 1131 bp, Homo sapiens
ccttcaatggctccaactcagaatcaaagccaaagtcctcacagtggcccatatgtccctcccgccctgcttgcccctctgagctcttctccatgtctcttcccctcatgcaccctgctacagccatgctggcctcctcaccttccctccatcacaccaaacatgctcctcctgcctcaggacctctgtccttactgtttcctctgcctggaacactttcccccagatttgggaaaatgacagtgattgagtttaaaacccatctgaaagttaaggaccatgcttgagttcacatatcactgtctactatgttgtactgtacataccgacttcagggatgtgagtgtcacgtggattgacatcttcaagtgtattgaaggcagctagtggctgtctaactgccccctgtctggtatgaggggtgctctgtgatagctgctgcttctggccttctttatctttggctctcaacacttgctctgtctcccccaccatcccagttctgattctgctgctcttgctgtttcttcggaggagagcggtggtcaaagagcccttactgcccccagaggatgacacccgggacaacgtttattactatgatgaagaaggaggcggagaagaggaccaggtgggttttgaaaaccttggtagctcagtggtgatctctttattcggaagaagcaatgattagtaagaggtaggcatttgaaacagctctgaatcactttggatattatctttttaaggccttacccaagaaagtagacattgtcattgaccatcatcatcatcacatcatcaccaacacagctaacatttattgatcgcatactgttctgcacctcagtgagcgagctgaggcacagagaagctcagtaacttggctaaggtcacacagctaggaagcgacagggctaaatggtctgtctcagagcctgccttcctcattgccattctctggacgtgaacttcagccagattctctttgacatagaacaactggtctgctttgtttcttttgagtttttagctagaccaaactccttttctgtcatggttataccttcagtccctctgtatttcctgattttggagatgatcttaacatcttaccctggagttgtccag

SEQ ID NO: 263 - DNA, 1144 bp, Homo sapiens
gatttaggcagagtttagctgaatggctctaacctgtgaattgtgtccaggtctgttccatgcaagtctcatctttgtaccagaagctggtgcctttcagacctttgcctgtgtcatatgttactgtcccattggctaagcaagtcacacaacaaagccccagatcgatggatgtatacttttctcacaagctggggttgggagggagtgaatatttgccaaacagtgatctaatcatcatgtcctatgaaaattagtaaggcacacagcctatatctggatccacacatgctactcacaatcctttgggccatgtttttttccagtgctatttgggagacttttagcttgaaaactgtcattttgcattaaactggtaaagatcatacagttggcagtgaaggcatcatccaaccataatctataaactgaacatagccctgtgtgtatgactatttctttcctactcttcattgtacttcaaccttttttctccaaaggactttgacttgagccagctgcacaggggcctggacgctcggcctgaagtgactcgtaacgacgttgcaccaaccctcatgagtgtcccccggtatcttccccgccctgccaatcccgatgaaattggaaattttattgatgaagtaagtaatccacgtggaaagccaaagcatggctcatctctaagctcaggaggagttgtgtcaaaaatgagaaaaagagtctttagattctttcctttactatgttttcagcttgcctgagccctggagccctgttttcctttttctttttttttctttttctttttttttttttttgagacgaagtttcactcttgttgcccaggctggagtgcaatggcgcaatctttgctcaccacaacctctgcccgggttcaagcgattctcctgcctcagcctcccaagtagctgggattacaggcatgcaccaccacactcagctaattttgtatttttaatagaggcagggtttctccatgttggtcaggctggtctctaactcctgactcaggtgatccacctgccttggcctcccaaagtgctgggattacaggtgtgagccaccgcacctggcagcctgtttttcttaatctgtgtctcatctgaattttggatctaat

SEQ ID NO: 264 - DNA, 3252 bp, Homo sapiens
agcctgtgtgacaagagtgaaaccctgtctctaaaaaaaaagaaaaagaaaaaaaatacaagtccttccttagttcccacacccccactccccagatttaactgttaagcatttggcatttatccttccaggcctttctgggtggaaatgcagcctgcatgcaccagtatgcaaagcttccagctctgcccatcccagctggtggtgtggcagccccactctgatctatggggactccatcctgactggttggtgcttgcatctctcctgcctacatataactcaccatttcactttctctttccatcaacaacatatcctgtgcttctgcatccttccatgacagtgtgtataaatgtacgttgttggtgttcactgctccgtggtgtgccacaagtctgggtgcattgtcgtaccttacatattgctagacttcttgccccagatgacaggtgtgcccttcctttcactaaaagatgcttttgtcccttcttctttagaatctgaaagcggctgatactgaccccacagccccgccttatgattctctgctcgtgtttgactatgaaggaagcggttccgaagctgctagtctgagctccctgaactcctcagagtcagacaaagaccaggactatgactacttgaacgaatggggcaatcgcttcaagaagctggctgacatgtacggaggcggcgaggacgactaggggactcgagagaggcgggccccagacccatgtgctgggaaatgcagaaatcacgttgctggtggtttttcagctcccttcccttgagatgagtttctggggaaaaaaaagagactggttagtgatgcagttagtatagctttatactctctccactttatagctctaataagtttgtgttagaaaagtttcgacttatttcttaaagcttttttttttttcccatcactctttacatggtggtgatgtccaaaagatacccaaattttaatattccagaagaacaactttagcatcagaaggttcacccagcaccttgcagattttcttaaggaattttgtctcacttttaaaaagaaggggagaagtcagctactctagttctgttgttttgtgtatataattttttaaaaaaaatttgtgtgcttctgctcattactacactggtgtgtccctctgccttttttttttttttaagacagggtctcattctatcggccaggctggagtgcagtggtgcaatcacagctcactgcagccttgtcctcccaggctcaagctatccttgcacctcagcctcccaagtagctgggaccacaggcatgcaccactacgcatgactaattttttaaatatttgagacggggtctccctgtgttacccaggctggtctcaaactcctgggctcaagtgatcctcccatcttggcctcccagagtattgggattacagacatgagccactgcacctgcccagctccccaactccctgccattttttaagagacagtttcgctccatcgcccaggcctgggatgcagtgatgtgatcatagctcactgtaacctcaaactctggggctcaagcagttctcccaccagcctcctttttatttttttgtacagatggggtcttgctatgttgcccaagctggtcttaaactcctggcctcaagcaatccttctgccttggccccccaaagtgctgggattgtgggcatgagctgctgtgcccagcctccatgttttaatatcaactctcactcctgaattcagttgctttgcccaagataggagttctctgatgcagaaattattgggctcttttagggtaagaagtttgtgtctttgtctggccacatcttgactaggtattgtctactctgaagacctttaatggcttccctctttcatctcctgagtatgtaacttgcaatgggcagctatccagtgacttgttctgagtaagtgtgttcattaatgtttatttagctctgaagcaagagtgatatactccaggacttagaatagtgcctaaagtgctgcagccaaagacagagcggaactatgaaaagtgggcttggagatggcaggagagcttgtcattgagcctggcaatttagcaaactgatgctgaggatgattgaggtgggtctacctcatctctgaaaattctggaaggaatggaggagtctcaacatgtgtttctgacacaagatccgtggtttgtactcaaagcccagaatccccaagtgcctgcttttgatgatgtctacagaaaatgctggctgagctgaacacatttgcccaattccaggtgtgcacagaaaaccgagaatattcaaaattccaaatttttttcttaggagcaagaagaaaatgtggccctaaagggggttagttgaggggtagggggtagtgaggatcttgatttggatctctttttatttaaatgtgaatttcaacttttgacaatcaaagaaaagacttttgttgaaatagctttactgtttctcaagtgttttggagaaaaaaatcaaccctgcaatcactttttggaattgtcttgatttttcggcagttcaagctatatcgaatatagttctgtgtagagaatgtcactgtagttttgagtgtatacatgtgtgggtgctgataattgtgtattttctttgggggtggaaaaggaaaacaattcaagctgagaaaagtattctcaaagatgcatttttataaattttattaaacaattttgttaaaccattgtcaaatttgttttatttgattccaccacatttccagtcaagagaaaagatgcatggagatggcctcagtcaaaacgtggagaaagaggccgggcgcggtggctcatgcctgtaatctcagcacttcgggaggccgaggcaggtagatcacttgagctcaggagtttgagaccagcctgggcaacgtagtgaaaccctgtctccacaaaaacacaaaaattagctgggcgtggtggcgcgcgcctgtagtcccagctactcgagaggctgagacatgagaatcacttgaactcaggaggcagaggttgcagtgagccgaggttgcgccactgcacttcagcctaggtgacagaggagactccatctcaaaaaaataaaaaaatttttaaaaaacttcatgctgaagtgacttctccagaagtttctatcattctactggatgaacatgggagaaactacattcacatggtaactttatttgaacagtatccatccatgt

SEQ ID NO: 265 - DNA, 1500 bp, Homo sapiens
gatgatgtctacagaaaatgctggctgagctgaacacatttgcccaattccaggtgtgcacagaaaaccgagaatattcaaaattccaaatttttttcttaggagcaagaagaaaatgtggccctaaagggggttagttgaggggtagggggtagtgaggatcttgatttggatctctttttatttaaatgtgaatttcaacttttgacaatcaaagaaaagacttttgttgaaatagctttactgtttctcaagtgttttggagaaaaaaatcaaccctgcaatcactttttggaattgtcttgatttttcggcagttcaagctatatcgaatatagttctgtgtagagaatgtcactgtagttttgagtgtatacatgtgtgggtgctgataattgtgtattttctttgggggtggaaaaggaaaacaattcaagctgagaaaagtattctcaaagatgcatttttataaattttattaaacaattttgttaaaccattgtcaaatttgttttatttgattccaccacatttccagtcaagagaaaagatgcatggagatggcctcagtcaaaacgtggagaaagaggccgggcgcggtggctcatgcctgtaatctcagcacttcgggaggccgaggcaggtagatcacttgagctcaggagtttgagaccagcctgggcaacgtagtgaaaccctgtctccacaaaaacacaaaaattagctgggcgtggtggcgcgcgcctgtagtcccagctactcgagaggctgagacatgagaatcacttgaactcaggaggcagaggttgcagtgagccgaggttgcgccactgcacttcagcctaggtgacagaggagactccatctcaaaaaaataaaaaaatttttaaaaaacttcatgctgaagtgacttctccagaagtttctatcattctactggatgaacatgggagaaactacattcacatggtaactttatttgaacagtatccatccatgtggcatgtgatgaaaccaataaaattcccatgtccacgggagactgtgtgggccaagctgaaggacgggacagagcaaagtttcaaacgatgttctcggggtcagcaagtgagtacaggccagtggttctctgctggggaagaatgtagccccctcctccatgtgacattttgcaatttctggagtacctggggaggtggtcttgtcaccacatcaaggccaggggtgctgctaaacatccctgcacgggacagttcctcacaacaaagaattatccagcacaaaatgtcagccactgttaagaaaccctggtgtaagcctaaaacttttctctgttgaaggggtatgacttttttctttgggtaattttttattgtaaaatacaacataaaatttatgattttagcccttttgttaagttttcagacagggtctcactctgtcacccgggctggagtgcagtggcacaatcacggctcgctgcagcctcaatctcccagt

SEQ ID NO: 266 - DNA, 2003 bp, Homo sapiens
cacctcctgtccgcccctcagcgcatgggtggcggtcacgtgcccagaacgtccggcgttcgccccgccctcccagtttccgcgcgcctctttggcagctggtcacatggtgagggtgggggtgagggggcctctctagcttgcggcctgtgtctatggtcgggccctctgcgtccagctgctccggaccgagctcgggtgtatggggccgtaggaaccggctccggggccccgataacgggccgcccccacagcaccccgggctggcgtgagggtctcccttgatctgagaatggctacctctcgatatgagccagtggctgaaattggtgtcggtgcctatgggacagtgtacaaggcccgtgatccccacagtggccactttgtggccctcaagagtgtgagagtccccaatggaggaggaggtggaggaggccttcccatcagcacagttcgtgaggtggctttactgaggcgactggaggcttttgagcatcccaatgttgtccggctgatggacgtctgtgccacatcccgaactgaccgggagatcaaggtaaccctggtgtttgagcatgtagaccaggacctaaggacatatctggacaaggcacccccaccaggcttgccagccgaaacgatcaaggatctgatgcgccagtttctaagaggcctagatttccttcatgccaattgcatcgttcaccgagatctgaagccagagaacattctggtgacaagtggtggaacagtcaagctggctgactttggcctggccagaatctacagctaccagatggcacttacacccgtggttgttacactctggtaccgagctcccgaagttcttctgcagtccacatatgcaacacctgtggacatgtggagtgttggctgtatctttgcagagatgtttcgtcgaaagcctctcttctgtggaaactctgaagccgaccagttgggcaaaatctttgacctgattgggctgcctccagaggatgactggcctcgagatgtatccctgccccgtggagcctttccccccagagggccccgcccagtgcagtcggtggtacctgagatggaggagtcgggagcacagctgctgctggaaatgctgacttttaacccacacaagcgaatctctgcctttcgagctctgcagcactcttatctacataaggatgaaggtaatccggagtgagcaatggagtggctgccatggaaggaagaaaagctgccatttcccttctggacactgagagggcaatctttgcctttatctctgaggctatggagggtcctcctccatctttctacagagattactttgctgccttaatgacattcccctcccacctctccttttgaggcttctccttctccttcccatttctctacactaaggggtatgttccctcttgtccctttccctacctttatatttggggtccttttttatacaggaaaaacaaaacaaagaaataatggtcttttttttttttttaatgtttcttcctctgtttggctttgccattgtgcgatttggaaaaaccacttggaagaagggactttcctgcaaaaccttaaagactggttaaattacagggcctaggaagtcagtggagccccttgactgacaaagcttagaaaggaactgaaattgcttctttgaatatggattttaggcggggcgtggtggctcacgcctataatcccagcacgttgggaggccaacgcgggtggatcacctgaggtcaggagttcgagaccagcctgactaacatggtgaaaccctgtctctactaaaaatacaaaattagtcaggcgtggtggtgcacacctgtaatcccagctacttgggagactgaggcaggaggatcgcttgaacccgggaggcagaggttgcggtgagccgagatcatgccattgcactccagcctgggcaacagagcaagactctgtgtcaaaaaaaaaaaaagaatatagatttttaaatggca

SEQ ID NO: 267 - DNA, 1500 bp, Homo sapiens
aaatgagtagtcacaaggtttgcagaagggggcatgtcattttcattcattgtggtggtctggagggtgcagggggtgtggtggtaactttcttgcacatgtgcaatcctgtatccgtcttatatatgatgtgataaataatatcatatacatacatatatacatagaagcatatatgcacacatacaaatatcacataatcatagaaccttcctactggaaaaaaaaaaaaaacttaaaaggtcaagtattcctgtctcctgctcatcaataacttctctgccagatggcctcaggtctttgcattaacactcccagggaggtttggaagttggaaaagtgagaggattaccttgtcactgagcctgttggattactgtattaatctgccttccgtcatcctttaatcgtagttttgccctcaaatgggcattgtttactccctattgtagaagaccccattgttggctacatctttatagatagtcgtaccactactttaaagggccagtgacagacaccaaaaacaaaataaaaacccacatacacactggaagcaagcactcagtaaaatgttgtagaattaatgaatgaaacaatgacacaaatgagagtatgttttctcatggtggagcgaaaaggtgacagcatcacctctggtaccccaactcccaccccctccccaatgcagacaggctgaaagaccggtagtgagactggagttcagccttcagaccggtagtgagacaatccttcagccgggagttgggctctgggtggcctaggttgccatggcaccgcctcgggctccaccctctcttgtccccctcaccgctccccccctgcagcgggggttgtggcagccagtcacgtgcccgccgcgtagccacacctctgctcctcagagcaatgtcaagcggtcacgtgtgatagcaacagatcacgtggctgccatcgcccctccgcccccttacactcttcgccctcctcccagtcgaagcacctcctgtccgcccctcagcgcatgggtggcggtcacgtgcccagaacgtccggcgttcgccccgccctcccagtttccgcgcgcctctttggcagctggtcacatggtgagggtgggggtgagggggcctctctagcttgcggcctgtgtctatggtcgggccctctgcgtccagctgctccggaccgagctcgggtgtatggggccgtaggaaccggctccggggccccgataacgggccgcccccacagcaccccgggctggcgtgaggtaagtgcagtcccttcccaggaatgagaaccagtgcccgcccccctcacagctttccacgcgttcgtttcgcgagctggttatggaagggtcgctcaagggcgggaagtggggcctttgtggtcatgggaaagtataattttagggactgaggtgtaggatcttcgatgcaaggcatgtgtcatgtgtgatctttgtgcggggcgcgattgtcccaaaggaaaaag

SEQ ID NO: 268 - DNA, 1273 bp, Homo sapiens
taaagggccagtgacagacaccaaaaacaaaataaaaacccacatacacactggaagcaagcactcagtaaaatgttgtagaattaatgaatgaaacaatgacacaaatgagagtatgttttctcatggtggagcgaaaaggtgacagcatcacctctggtaccccaactcccaccccctccccaatgcagacaggctgaaagaccggtagtgagactggagttcagccttcagaccggtagtgagacaatccttcagccgggagttgggctctgggtggcctaggttgccatggcaccgcctcgggctccaccctctcttgtccccctcaccgctccccccctgcagcgggggttgtggcagccagtcacgtgcccgccgcgtagccacacctctgctcctcagagcaatgtcaagcggtcacgtgtgatagcaacagatcacgtggctgccatcgcccctccgcccccttacactcttcgccctcctcccagtcgaagcacctcctgtccgcccctcagcgcatgggtggcggtcacgtgcccagaacgtccggcgttcgccccgccctcccagtttccgcgcgcctctttggcagctggtcacatggtgagggtgggggtgagggggcctctctagcttgcggcctgtgtctatggtcgggccctctgcgtccagctgctccggaccgagctcgggtgtatggggccgtaggaaccggctccggggccccgataacgggccgcccccacagcaccccgggctggcgtgaggtaagtgcagtcccttcccaggaatgagaaccagtgcccgcccccctcacagctttccacgcgttcgtttcgcgagctggttatggaagggtcgctcaagggcgggaagtggggcctttgtggtcatgggaaagtataattttagggactgaggtgtaggatcttcgatgcaaggcatgtgtcatgtgtgatctttgtgcggggcgcgattgtcccaaaggaaaaagcgttttctattgcagggcctcacgtggctggaggggttggtattgagtcattgtgttatctctggggccggccccaaggaagactgggagcgggggatgggatgctggtggtgttctttgcgctttttttttgggagtccctttgttgctgcaggctcataccatcctaactctgtaagcgacttttggtgataggagtctgtgattgtagggtctcccttgatctgagaatggctacctctcgatatgagccagtggctgaaattggtgtcg

SEQ ID NO: 269 - DNA, 1237 bp, Homo sapiens
taggaaccggctccggggccccgataacgggccgcccccacagcaccccgggctggcgtgaggtaagtgcagtcccttcccaggaatgagaaccagtgcccgcccccctcacagctttccacgcgttcgtttcgcgagctggttatggaagggtcgctcaagggcgggaagtggggcctttgtggtcatgggaaagtataattttagggactgaggtgtaggatcttcgatgcaaggcatgtgtcatgtgtgatctttgtgcggggcgcgattgtcccaaaggaaaaagcgttttctattgcagggcctcacgtggctggaggggttggtattgagtcattgtgttatctctggggccggccccaaggaagactgggagcgggggatgggatgctggtggtgttctttgcgctttttttttgggagtccctttgttgctgcaggctcataccatcctaactctgtaagcgacttttggtgataggagtctgtgattgtagggtctcccttgatctgagaatggctacctctcgatatgagccagtggctgaaattggtgtcggtgcctatgggacagtgtacaaggcccgtgatccccacagtggccactttgtggccctcaagagtgtgagagtccccaatggaggaggaggtggaggaggccttcccatcagcacagttcgtgaggtggctttactgaggcgactggaggcttttgagcatcccaatgttgtccggtgagaaggtggtggagggttgggcgtggggagtaaagggaaaagacagcctataggtggggtgtgatgatctgtagagaagtggggaccctgaggaaataatgagaggccatgttgggttaaaggggattgaaaagtgagcatttactctggtcaggctgatggacgtctgtgccacatcccgaactgaccgggagatcaaggtaaccctggtgtttgagcatgtagaccaggacctaaggacatatctggacaaggcacccccaccaggcttgccagccgaaacgatcaaggtgagtggggttggtaggcattgagaggtggattgggacctttgtagtagaaccttctgggatttcaggtatggtgcctagtttccagtgcatctgtacctcccctttgaaactaggatctgatgcgccagtttctaagaggcctagatttccttcatgccaattgcatcgttcaccgagatctgaagccagagaacattctggtga

SEQ ID NO: 270 - DNA, 1136 bp, Homo sapiens
tggtggtgttctttgcgctttttttttgggagtccctttgttgctgcaggctcataccatcctaactctgtaagcgacttttggtgataggagtctgtgattgtagggtctcccttgatctgagaatggctacctctcgatatgagccagtggctgaaattggtgtcggtgcctatgggacagtgtacaaggcccgtgatccccacagtggccactttgtggccctcaagagtgtgagagtccccaatggaggaggaggtggaggaggccttcccatcagcacagttcgtgaggtggctttactgaggcgactggaggcttttgagcatcccaatgttgtccggtgagaaggtggtggagggttgggcgtggggagtaaagggaaaagacagcctataggtggggtgtgatgatctgtagagaagtggggaccctgaggaaataatgagaggccatgttgggttaaaggggattgaaaagtgagcatttactctggtcaggctgatggacgtctgtgccacatcccgaactgaccgggagatcaaggtaaccctggtgtttgagcatgtagaccaggacctaaggacatatctggacaaggcacccccaccaggcttgccagccgaaacgatcaaggtgagtggggttggtaggcattgagaggtggattgggacctttgtagtagaaccttctgggatttcaggtatggtgcctagtttccagtgcatctgtacctcccctttgaaactaggatctgatgcgccagtttctaagaggcctagatttccttcatgccaattgcatcgttcaccgagatctgaagccagagaacattctggtgacaagtggtggaacagtcaagctggctgactttggcctggccagaatctacagctaccagatggcacttacacccgtggtcagtagaaagatggtaccaaaatgggttctggttgggagtaggagagtgattgcccgtagcaattgagaagtcatgtgcttcatgtgttcagtcaagcaagttgtgtttcatggtaacccatggggtccccatccattcttcctattccctttaggttgttacactctggtaccgagctcccgaagttcttctgcagtccacatatgcaacacc

SEQ ID NO: 271 - DNA, 1168 bp, Homo sapiens
gaggaggtggaggaggccttcccatcagcacagttcgtgaggtggctttactgaggcgactggaggcttttgagcatcccaatgttgtccggtgagaaggtggtggagggttgggcgtggggagtaaagggaaaagacagcctataggtggggtgtgatgatctgtagagaagtggggaccctgaggaaataatgagaggccatgttgggttaaaggggattgaaaagtgagcatttactctggtcaggctgatggacgtctgtgccacatcccgaactgaccgggagatcaaggtaaccctggtgtttgagcatgtagaccaggacctaaggacatatctggacaaggcacccccaccaggcttgccagccgaaacgatcaaggtgagtggggttggtaggcattgagaggtggattgggacctttgtagtagaaccttctgggatttcaggtatggtgcctagtttccagtgcatctgtacctcccctttgaaactaggatctgatgcgccagtttctaagaggcctagatttccttcatgccaattgcatcgttcaccgagatctgaagccagagaacattctggtgacaagtggtggaacagtcaagctggctgactttggcctggccagaatctacagctaccagatggcacttacacccgtggtcagtagaaagatggtaccaaaatgggttctggttgggagtaggagagtgattgcccgtagcaattgagaagtcatgtgcttcatgtgttcagtcaagcaagttgtgtttcatggtaacccatggggtccccatccattcttcctattccctttaggttgttacactctggtaccgagctcccgaagttcttctgcagtccacatatgcaacacctgtggacatgtggagtgttggctgtatctttgcagagatgtttcgtcgaaagtatgggacccacataccctggactaccttgaattccccaaatcgcttgttcataaaccacatccataccttgcccattctttttttttgagaccagggcttgctgtgttgcccaggctggattgcaatggcatgatcacagctcactgcagcttcaacctcctgggctcaagtgatcctcccatctcagcttcccaactagctgacactacaggcacgcacctccatgcttg

SEQ ID NO: 272 - DNA, 1110 bp, Homo sapiens
acctaaggacatatctggacaaggcacccccaccaggcttgccagccgaaacgatcaaggtgagtggggttggtaggcattgagaggtggattgggacctttgtagtagaaccttctgggatttcaggtatggtgcctagtttccagtgcatctgtacctcccctttgaaactaggatctgatgcgccagtttctaagaggcctagatttccttcatgccaattgcatcgttcaccgagatctgaagccagagaacattctggtgacaagtggtggaacagtcaagctggctgactttggcctggccagaatctacagctaccagatggcacttacacccgtggtcagtagaaagatggtaccaaaatgggttctggttgggagtaggagagtgattgcccgtagcaattgagaagtcatgtgcttcatgtgttcagtcaagcaagttgtgtttcatggtaacccatggggtccccatccattcttcctattccctttaggttgttacactctggtaccgagctcccgaagttcttctgcagtccacatatgcaacacctgtggacatgtggagtgttggctgtatctttgcagagatgtttcgtcgaaagtatgggacccacataccctggactaccttgaattccccaaatcgcttgttcataaaccacatccataccttgcccattctttttttttgagaccagggcttgctgtgttgcccaggctggattgcaatggcatgatcacagctcactgcagcttcaacctcctgggctcaagtgatcctcccatctcagcttcccaactagctgacactacaggcacgcacctccatgcttggctagtttgttaatatttttatagagatggggtctcagtatattgcccaggctggtcttgaactcttgcactcaagcaatcctcccacccctacctcccaaagtagcataagctactgcatctggccccattcttttacttgcgtactactaacttgcccatagcagaaagctctgaaatgttctggaattaggaacttcatatccctttattctctttattttttatttatttatttatttatttatttatttatttatttattta

SEQ ID NO: 273 - DNA, 1051 bp, Homo sapiens
ttttttttttagatggagtcttgctctgtcgccaggctggagtgcagtagtgcgatctctgctcactgcaacctccacctcccagattcaagcaattctcttgactcagcctcccaagtagctgggaccacaggtgcacgccaccatgctcagctaatttttgtacttttagtaatgacagggtttcaccatgttggccaggatggtctcgatctcttgacctcatgatccacccacatcagactcccaaagtgctaggattacaggcgtgagccgctgcacctggcatttctttttttttaaaaaaagagacaaggtcttgcttgcccaggctgatctagaactcctgggctcaagcagtcctctcacctcagcatcccaaagtgctggaattgttggcctttattccctatacttcctattttgagccactaagcagtaaccattcaactaagatatctttgaaaatgactgctaccttatatcccttctcaccttaggcctctcttctgtggaaactctgaagccgaccagttgggcaaaatctttgagtaagtgaccaacatgggagaaaaagattttctattctgagtcctctttctgctgaacccaggatggcaactggctctgcccatggggatgggaactggaggaccctcctgaccagagttctcctgtcccccacagcctgattgggctgcctccagaggatgactggcctcgagatgtatccctgccccgtggagcctttccccccagagggccccgcccagtgcagtcggtggtacctgagatggaggagtcgggagcacagctgctgctggtactggagatggctgtgggcacagggaaagaaatagagactggggaaagaaatagagcagtatgcagggccctggccactgtggttaatgaaacttggttggtagatgggctgtagtttttattacagctgcaaatagccacccacagagaaggatatagaagagaacccatcctggctgggcacggtggctcacgcctgtaatcccagcactttgggaggccaagg

SEQ ID NO: 274 - DNA, 1136 bp, Homo sapiens
accatgttggccaggatggtctcgatctcttgacctcatgatccacccacatcagactcccaaagtgctaggattacaggcgtgagccgctgcacctggcatttctttttttttaaaaaaagagacaaggtcttgcttgcccaggctgatctagaactcctgggctcaagcagtcctctcacctcagcatcccaaagtgctggaattgttggcctttattccctatacttcctattttgagccactaagcagtaaccattcaactaagatatctttgaaaatgactgctaccttatatcccttctcaccttaggcctctcttctgtggaaactctgaagccgaccagttgggcaaaatctttgagtaagtgaccaacatgggagaaaaagattttctattctgagtcctctttctgctgaacccaggatggcaactggctctgcccatggggatgggaactggaggaccctcctgaccagagttctcctgtcccccacagcctgattgggctgcctccagaggatgactggcctcgagatgtatccctgccccgtggagcctttccccccagagggccccgcccagtgcagtcggtggtacctgagatggaggagtcgggagcacagctgctgctggtactggagatggctgtgggcacagggaaagaaatagagactggggaaagaaatagagcagtatgcagggccctggccactgtggttaatgaaacttggttggtagatgggctgtagtttttattacagctgcaaatagccacccacagagaaggatatagaagagaacccatcctggctgggcacggtggctcacgcctgtaatcccagcactttgggaggccaaggtgggcgtatcacctgaggtcaggagttcgagaccagcctggccaacatggtgaaacctcgtctctactaaaagtacaaaaataagccgggggtggtggcacacgcctgtaatctcagctacttgggaggctgagataggagaatcacttcaactcaggaggcggaggttgcagtgagctgagatcataccattgcactccagcctgggtgatagagcgagactccgtctcaaaaaaaaaaaaaaagaaaaaagaagaaagctcatcccaggt

SEQ ID NO: 275 - DNA, 1891 bp, Homo sapiens
gcagggccctggccactgtggttaatgaaacttggttggtagatgggctgtagtttttattacagctgcaaatagccacccacagagaaggatatagaagagaacccatcctggctgggcacggtggctcacgcctgtaatcccagcactttgggaggccaaggtgggcgtatcacctgaggtcaggagttcgagaccagcctggccaacatggtgaaacctcgtctctactaaaagtacaaaaataagccgggggtggtggcacacgcctgtaatctcagctacttgggaggctgagataggagaatcacttcaactcaggaggcggaggttgcagtgagctgagatcataccattgcactccagcctgggtgatagagcgagactccgtctcaaaaaaaaaaaaaaagaaaaaagaagaaagctcatcccaggtattgttgtgggtgggcagaagtctgttttcttcatggttttctgacctttgcctctcccctcaggaaatgctgacttttaacccacacaagcgaatctctgcctttcgagctctgcagcactcttatctacataaggatgaaggtaatccggagtgagcaatggagtggctgccatggaaggaagaaaagctgccatttcccttctggacactgagagggcaatctttgcctttatctctgaggctatggagggtcctcctccatctttctacagagattactttgctgccttaatgacattcccctcccacctctccttttgaggcttctccttctccttcccatttctctacactaaggggtatgttccctcttgtccctttccctacctttatatttggggtccttttttatacaggaaaaacaaaacaaagaaataatggtcttttttttttttttaatgtttcttcctctgtttggctttgccattgtgcgatttggaaaaaccacttggaagaagggactttcctgcaaaaccttaaagactggttaaattacagggcctaggaagtcagtggagccccttgactgacaaagcttagaaaggaactgaaattgcttctttgaatatggattttaggcggggcgtggtggctcacgcctataatcccagcacgttgggaggccaacgcgggtggatcacctgaggtcaggagttcgagaccagcctgactaacatggtgaaaccctgtctctactaaaaatacaaaattagtcaggcgtggtggtgcacacctgtaatcccagctacttgggagactgaggcaggaggatcgcttgaacccgggaggcagaggttgcggtgagccgagatcatgccattgcactccagcctgggcaacagagcaagactctgtgtcaaaaaaaaaaaaagaatatagatttttaaatggcttttacttttatattcgctaaactttctcaaactggatcctgcttattacaggaaagagttcttggttgttttctccttggccctatccctgatttacccttagagccacaccagggtatgttgaggtgatccagtatatggacagaggaagggaaacagctaagaatgactccagcccccatcctatgcactcacagaagcttcccatatcctcttggagagagaggaagaaagtttttccttttattccttatagtctggctcccactaaaatatgtcaaggcataaagtcttgctattccatcaattttagaggatgtgacaaggggcctttcctttttctcaaaccaaaacggttacagaccctagatattccctaagggaggaagagaaagcttagagagagcagaagaaaagtcagaaggatccaaagtctcatagaaaggcactggggttggctctaggatccttctgattccgaaatctcattgctagccaa

SEQ ID NO: 276 - DNA, 1500 bp, Homo sapiens
tttttaatgtttcttcctctgtttggctttgccattgtgcgatttggaaaaaccacttggaagaagggactttcctgcaaaaccttaaagactggttaaattacagggcctaggaagtcagtggagccccttgactgacaaagcttagaaaggaactgaaattgcttctttgaatatggattttaggcggggcgtggtggctcacgcctataatcccagcacgttgggaggccaacgcgggtggatcacctgaggtcaggagttcgagaccagcctgactaacatggtgaaaccctgtctctactaaaaatacaaaattagtcaggcgtggtggtgcacacctgtaatcccagctacttgggagactgaggcaggaggatcgcttgaacccgggaggcagaggttgcggtgagccgagatcatgccattgcactccagcctgggcaacagagcaagactctgtgtcaaaaaaaaaaaaagaatatagatttttaaatggcttttacttttatattcgctaaactttctcaaactggatcctgcttattacaggaaagagttcttggttgttttctccttggccctatccctgatttacccttagagccacaccagggtatgttgaggtgatccagtatatggacagaggaagggaaacagctaagaatgactccagcccccatcctatgcactcacagaagcttcccatatcctcttggagagagaggaagaaagtttttccttttattccttatagtctggctcccactaaaatatgtcaaggcataaagtcttgctattccatcaattttagaggatgtgacaaggggcctttcctttttctcaaaccaaaacggttacagaccctagatattccctaagggaggaagagaaagcttagagagagcagaagaaaagtcagaaggatccaaagtctcatagaaaggcactggggttggctctaggatccttctgattccgaaatctcattgctagccaaacaccaaggatctgtaggaacaaagggagagagataagtatcaattaattctcagtctcaaaaaggatgtgtgtgagggaactggagaatgttacctctgtaaagctaaagaagagtccaacaccccctaggattttcagggcttcgtctgaatgcttaagaaacttttctccacacatctggcatgtggggctctggctcttgcagatctgaggataaaacgtgaagaatgcaaagttgtgaatgtaaagttgctagtgactaatacctatgccgaatgtccctagaaactttactgttatctgaccagtgtcctacaaactaaaatcctacttggctaattccccagcctctatccacccccacctcccaccaacacagccccaatacaagagggcttgtagagagagaaacaatgacattcaaactaaatttgccaacttgggcattgtccttacccagtttcctacctcccctggctgctgcaccacccccaacac

SEQ ID NO: 277 - DNA, 1267 bp, Homo sapiens
cgagggctgcttccggctggtgcccccgggggagacccaacctggggcgacttcaggggtgccacattcgctaagtgctcggagttaatagcacctcctccgagcactcgctcacggcgtccccttgcctggaaagataccgcggtccctccagaggatttgagggacagggtcggagggggctcttccgccagcaccggaggaagaaagaggaggggctggctggtcaccagagggtggggcggaccgcgtgcgctcggcggctgcggagagggggagagcaggcagcgggcggcggggagcagcatggagccggcggcggggagcagcatggagccttcggctgactggctggccacggccgcggcccggggtcgggtagaggaggtgcgggcgctgctggaggcgggggcgctgcccaacgcaccgaatagttacggtcggaggccgatccaggtcatgatgatgggcagcgcccgagtggcggagctgctgctgctccacggcgcggagcccaactgcgccgaccccgccactctcacccgacccgtgcacgacgctgcccgggagggcttcctggacacgctggtggtgctgcaccgggccggggcgcggctggacgtgcgcgatgcctggggccgtctgcccgtggacctggctgaggagctgggccatcgcgatgtcgcacggtacctgcgcgcggctgcggggggcaccagaggcagtaaccatgcccgcatagatgccgcggaaggtccctcagacatccccgattgaaagaaccagagaggctctgagaaacctcgggaaacttagatcatcagtcaccgaaggtcctacagggccacaactgcccccgccacaacccaccccgctttcgtagttttcatttagaaaatagagcttttaaaaatgtcctgccttttaacgtagatatatgccttcccccactaccgtaaatgtccatttatatcattttttatatattcttataaaaatgtaaaaaagaaaaacaccgcttctgccttttcactgtgttggagttttctggagtgagcactcacgccctaagcgcacattcatgtgggcatttcttgcgagcctcgcagcctccggaagctgtcgacttcatgacaagcattttgtgaactagggaagctcaggggggttactggcttctcttgagtcacactgctagcaaatggcagaaccaaagctcaaataaaaataaaataattttcattcattcactcaaaaaaaaaaaaaa

SEQ ID NO: 278 - DNA, 1235 bp, Homo sapiens
atggagccggcggcggggagcagcatggagccttcggctgactggctggccacggccgcggcccggggtcgggtagaggaggtgcgggcgctgctggaggcgggggcgctgcccaacgcaccgaatagttacggtcggaggccgatccaggtgggtagagggtctgcagcgggagcaggggatggcgggcgactctggaggacgaagtttgcaggggaattggaatcaggtagcgcttcgattctccggaaaaaggggaggcttcctggggagttttcagaaggggtttgtaatcacagacctcctcctggcgacgccctgggggcttgggaagccaaggaagaggaatgaggagccacgcgcgtacagatctctcgaatgctgagaagatctgaaggggggaacatatttgtattagatggaagtcatgatgatgggcagcgcccgagtggcggagctgctgctgctccacggcgcggagcccaactgcgccgaccccgccactctcacccgacccgtgcacgacgctgcccgggagggcttcctggacacgctggtggtgctgcaccgggccggggcgcggctggacgtgcgcgatgcctggggccgtctgcccgtggacctggctgaggagctgggccatcgcgatgtcgcacggtacctgcgcgcggctgcggggggcaccagaggcagtaaccatgcccgcatagatgccgcggaaggtccctcagacatccccgattgaaagaaccagagaggctctgagaaacctcgggaaacttagatcatcagtcaccgaaggtcctacagggccacaactgcccccgccacaacccaccccgctttcgtagttttcatttagaaaatagagcttttaaaaatgtcctgccttttaacgtagatatatgccttcccccactaccgtaaatgtccatttatatcattttttatatattcttataaaaatgtaaaaaagaaaaacaccgcttctgccttttcactgtgttggagttttctggagtgagcactcacgccctaagcgcacattcatgtgggcatttcttgcgagcctcgcagcctccggaagctgtcgacttcatgacaagcattttgtgaactagggaagctcaggggggttactggcttctcttgagtcacactgctagcaaatggcagaaccaaagctcaaataaaaataaaataattttcattcattcactcaaaaaaaaaaaaaa

SEQ ID NO: 279 - DNA, 1164 bp, Homo sapiens
cgctcagggaaggcgggtgcgcgcctgcggggcggagatgggcagggggcggtgcgtgggtcccagtctgcagttaagggggcaggagtggcgctgctcacctctggtgccaaagggcggcgcagcggctgccgagctcggccctggaggcggcgagaacatggtgcgcaggttcttggtgaccctccggattcggcgcgcgtgcggcccgccgcgagtgagggttttcgtggttcacatcccgcggctcacgggggagtgggcagcgccaggggcgcccgccgctgtggccctcgtgctgatgctactgaggagccagcgtctagggcagcagccgcttcctagaagaccaggtcatgatgatgggcagcgcccgagtggcggagctgctgctgctccacggcgcggagcccaactgcgccgaccccgccactctcacccgacccgtgcacgacgctgcccgggagggcttcctggacacgctggtggtgctgcaccgggccggggcgcggctggacgtgcgcgatgcctggggccgtctgcccgtggacctggctgaggagctgggccatcgcgatgtcgcacggtacctgcgcgcggctgcggggggcaccagaggcagtaaccatgcccgcatagatgccgcggaaggtccctcagacatccccgattgaaagaaccagagaggctctgagaaacctcgggaaacttagatcatcagtcaccgaaggtcctacagggccacaactgcccccgccacaacccaccccgctttcgtagttttcatttagaaaatagagcttttaaaaatgtcctgccttttaacgtagatatatgccttcccccactaccgtaaatgtccatttatatcattttttatatattcttataaaaatgtaaaaaagaaaaacaccgcttctgccttttcactgtgttggagttttctggagtgagcactcacgccctaagcgcacattcatgtgggcatttcttgcgagcctcgcagcctccggaagctgtcgacttcatgacaagcattttgtgaactagggaagctcaggggggttactggcttctcttgagtcacactgctagcaaatggcagaaccaaagctcaaataaaaataaaataattttcattcattcactcaaaaaaaaaaaaaa

SEQ ID NO: 280 - DNA, 1464 bp, Homo sapiens
cgagggctgcttccggctggtgcccccgggggagacccaacctggggcgacttcaggggtgccacattcgctaagtgctcggagttaatagcacctcctccgagcactcgctcacggcgtccccttgcctggaaagataccgcggtccctccagaggatttgagggacagggtcggagggggctcttccgccagcaccggaggaagaaagaggaggggctggctggtcaccagagggtggggcggaccgcgtgcgctcggcggctgcggagagggggagagcaggcagcgggcggcggggagcagcatggagccggcggcggggagcagcatggagccttcggctgactggctggccacggccgcggcccggggtcgggtagaggaggtgcgggcgctgctggaggcgggggcgctgcccaacgcaccgaatagttacggtcggaggccgatccaggtcatgatgatgggcagcgcccgagtggcggagctgctgctgctccacggcgcggagcccaactgcgccgaccccgccactctcacccgacccgtgcacgacgctgcccgggagggcttcctggacacgctggtggtgctgcaccgggccggggcgcggctggacgtgcgcgatgcctggggccgtctgcccgtggacctggctgaggagctgggccatcgcgatgtcgcacggtacctgcgcgcggctgcggggggcaccagaggcagtaaccatgcccgcatagatgccgcggaaggtccctcagaaatgatcggaaaccatttgtgggtttgtagaagcaggcatgcgtagggaagctacgggattccgccgaggagcgccagagcctgaggcgccctttggttatcgcaagctggctggctcactccgcaccaggtgcaaaagatgcctggggatgcgggaagggaaaggccacatcttcacgccttcgcgcctggcattacatccccgattgaaagaaccagagaggctctgagaaacctcgggaaacttagatcatcagtcaccgaaggtcctacagggccacaactgcccccgccacaacccaccccgctttcgtagttttcatttagaaaatagagcttttaaaaatgtcctgccttttaacgtagatatatgccttcccccactaccgtaaatgtccatttatatcattttttatatattcttataaaaatgtaaaaaagaaaaacaccgcttctgccttttcactgtgttggagttttctggagtgagcactcacgccctaagcgcacattcatgtgggcatttcttgcgagcctcgcagcctccggaagctgtcgacttcatgacaagcattttgtgaactagggaagctcaggggggttactggcttctcttgagtcacactgctagcaaatggcagaaccaaagctcaaataaaaataaaataattttcattcattcactcaaaaaaaaaaaaaa

SEQ ID NO: 281 - DNA, 1500 bp, Homo sapiens
gtgctgggattacaggtgtgagccaccgcgtcctgctccaaagcattttctttctatgcctcaaaacaagattgcaagccagtcctcaaagcggataattcaagagctaacaggtattagcttaggatgtgtggcactgttcttaaggcttatatgtattaatacatcatttaaactcacaacaacccctataaagcagggggcactcatattcccttccccctttataattacgaaaaatgcaaggtattttcagtaggaaagagaaatgtgagaagtgtgaaggagacaggacagtatttgaagctggtctttggatcactgtgcaactctgcttctagaacactgagcactttttctggtctaggaattatgactttgagaatggagtccgtccttccaatgactccctccccattttcctatctgcctacaggcagaattctcccccgtccgtattaaataaacctcatcttttcagagtctgctcttataccaggcaatgtacacgtctgagaaacccttgccccagacagccgttttacacgcaggaggggaaggggaggggaaggagagagcagtccgactctccaaaaggaatcctttgaactagggtttctgacttagtgaaccccgcgctcctgaaaatcaagggttgagggggtagggggacactttctagtcgtacaggtgatttcgattctcggtggggctctcacaactaggaaagaatagttttgctttttcttatgattaaaagaagaagccatactttccctatgacaccaaacaccccgattcaatttggcagttaggaaggttgtatcgcggaggaaggaaacggggcgggggcggatttctttttaacagagtgaacgcactcaaacacgcctttgctggcaggcgggggagcgcggctgggagcagggaggccggagggcggtgtggggggcaggtggggaggagcccagtcctccttccttgccaacgctggctctggcgagggctgcttccggctggtgcccccgggggagacccaacctggggcgacttcaggggtgccacattcgctaagtgctcggagttaatagcacctcctccgagcactcgctcacggcgtccccttgcctggaaagataccgcggtccctccagaggatttgagggacagggtcggagggggctcttccgccagcaccggaggaagaaagaggaggggctggctggtcaccagagggtggggcggaccgcgtgcgctcggcggctgcggagagggggagagcaggcagcgggcggcggggagcagcatggagccggcggcggggagcagcatggagccttcggctgactggctggccacggccgcggcccggggtcgggtagaggaggtgcgggcgctgctggaggcgggggcgctgcccaacgcaccgaatagttacggtcggaggccgatccaggtgggtagagggtctgcagcgggagcaggggatggcgggcgact

SEQ ID NO: 282 - DNA, 1456 bp, Homo sapiens
caatgtacacgtctgagaaacccttgccccagacagccgttttacacgcaggaggggaaggggaggggaaggagagagcagtccgactctccaaaaggaatcctttgaactagggtttctgacttagtgaaccccgcgctcctgaaaatcaagggttgagggggtagggggacactttctagtcgtacaggtgatttcgattctcggtggggctctcacaactaggaaagaatagttttgctttttcttatgattaaaagaagaagccatactttccctatgacaccaaacaccccgattcaatttggcagttaggaaggttgtatcgcggaggaaggaaacggggcgggggcggatttctttttaacagagtgaacgcactcaaacacgcctttgctggcaggcgggggagcgcggctgggagcagggaggccggagggcggtgtggggggcaggtggggaggagcccagtcctccttccttgccaacgctggctctggcgagggctgcttccggctggtgcccccgggggagacccaacctggggcgacttcaggggtgccacattcgctaagtgctcggagttaatagcacctcctccgagcactcgctcacggcgtccccttgcctggaaagataccgcggtccctccagaggatttgagggacagggtcggagggggctcttccgccagcaccggaggaagaaagaggaggggctggctggtcaccagagggtggggcggaccgcgtgcgctcggcggctgcggagagggggagagcaggcagcgggcggcggggagcagcatggagccggcggcggggagcagcatggagccttcggctgactggctggccacggccgcggcccggggtcgggtagaggaggtgcgggcgctgctggaggcgggggcgctgcccaacgcaccgaatagttacggtcggaggccgatccaggtgggtagagggtctgcagcgggagcaggggatggcgggcgactctggaggacgaagtttgcaggggaattggaatcaggtagcgcttcgattctccggaaaaaggggaggcttcctggggagttttcagaaggggtttgtaatcacagacctcctcctggcgacgccctgggggcttgggaagccaaggaagaggaatgaggagccacgcgcgtacagatctctcgaatgctgagaagatctgaaggggggaacatatttgtattagatggaagtatgctctttatcagatacaaaatttacgaacgtttgggataaaaagggagtcttaaagaaatgtaagatgtgctgggactacttagcctccaattcacagatacctggatggagcttatctttcttactaggagggattatcagtggaaatctgtggtgtatgttggaataaatatcgaatataaattttgatcgaaattattcagaagcggccgggcgcggtg

SEQ ID NO: 283 - DNA, 1307 bp, Homo sapiens
cattcccagaagctaagtgtaacttaaaagttttgtgagaatttgttttaacaaacaaacaagttttctctttttaacaattaccacattctgcgcttggatatacagcagtgaacaaaaaaaaaaaaaaaaatctccaggcctaacataatttcaggaagaaatttcagtagttgtatctcaggggaaatacaggaagttagcctggagtaaaagtcagtctgtccctgcccctttgctattttgcccgtgcctcacagtgctctctgcctgtgacgacagctccgcagaagttcggaggatataatggaattcattgtgtactgaagaatggatagagaactcaagaaggaaattggaaactggaagcaaatgtaggggtaattagacacctggggcttgtgtgggggtctgcttggcggtgagggggctctacacaagcttcctttccgtcatgccggcccccaccctggctctgaccattctgttctctctggcaggtcatgatgatgggcagcgcccgagtggcggagctgctgctgctccacggcgcggagcccaactgcgccgaccccgccactctcacccgacccgtgcacgacgctgcccgggagggcttcctggacacgctggtggtgctgcaccgggccggggcgcggctggacgtgcgcgatgcctggggccgtctgcccgtggacctggctgaggagctgggccatcgcgatgtcgcacggtacctgcgcgcggctgcggggggcaccagaggcagtaaccatgcccgcatagatgccgcggaaggtccctcaggtgaggactgatgatctgagaatttgtaccctgagagcttccaaagctcagagcattcattttccagcacagaaagttcagcccgggagaccagtctccggtcttgcctcagctcacgcgccaatcggtgggacggcctgagtctccctatcgccctgccccgccagggcggcaaatgggaaataatcccgaaatggacttgcgcacgtgaaagcccattttgtacattatacttcccaaagcataccaccacccaaacacctaccctctgctagttcaaggcctagactgcggagcaatgaagactcaagaggctagaggtctagtgccccctcttcctccaaactagggccagttgcatccacttaccaggtctgtttcctcatttgcataccaagctggctggaccaacctcaggatttccaaacccaattgtgcgtggcatcatctggagatctctcgatctcggctcttctgcacaactcaactaatctgaccct

SEQ ID NO: 284 - DNA, 1197 bp, Homo sapiens
ggaccacaggtgcacgccacgacgcctgggtttgtttgtttgtttaatagagacgaaggtctcaccatgttatctgggctcaagcgatcatcccccctcctcctcctaaagtactgggattacagtcccaagctatcttgcccgacctgggaaacagacgttaaggaagataacaatctattttcagagagcgagtttataaaaccaatgcaatgggtaaatatgaagtgtgaataggaggagaagctaaagagtggtcggagaatctaatgcaagctacgggagaaagaaactcaagtgcaaatgctgcctcaggaataaacgtaaaaagagactttcaagtgcaaatgctccctcaggaataaaataatcttgagactctcaagtgtaaatgctgcctcgggagaaccgaacggcgagctggagcccatacgcaacgagattagagaggaaggcagaagccagagcacatgaataaatgagcatccattttgtttcagaaatgatcggaaaccatttgtgggtttgtagaagcaggcatgcgtagggaagctacgggattccgccgaggagcgccagagcctgaggcgccctttggttatcgcaagctggctggctcactccgcaccaggtgcaaaagatgcctggggatgcgggaagggaaaggccacatcttcacgccttcgcgcctggcattgtgagcaaccactgagactcattatataacactcgttttcttcttgcaaccctgcgggccgcgcggtcgcgctttctctgccctccgccgggtggacctggagcgcttgagcggtcggcgcgcctggagcagccaggcgggcagtggactagctgctggaccagggaggtgtgggagagcggtggcggcgggtacatgcacgtgaagccattgcgagaactttatccataagtatttcaatgccggtagggacggcaagagaggagggcgggatgtgccacacatctttgacctcaggtttctaacgcctgttttctttctgccctctgcagacatccccgattgaaagaaccagagaggctctgagaaacctcgggaaacttagatcatcagtcaccgaaggtcctacagggccacaactgcccccgccacaacccaccccgctttcgtagttttcatttagaaaatagagcttttaaaaatgtcctgccttttaacgt

SEQ ID NO: 285 - DNA, 1491 bp, Homo sapiens
agaagcaggcatgcgtagggaagctacgggattccgccgaggagcgccagagcctgaggcgccctttggttatcgcaagctggctggctcactccgcaccaggtgcaaaagatgcctggggatgcgggaagggaaaggccacatcttcacgccttcgcgcctggcattgtgagcaaccactgagactcattatataacactcgttttcttcttgcaaccctgcgggccgcgcggtcgcgctttctctgccctccgccgggtggacctggagcgcttgagcggtcggcgcgcctggagcagccaggcgggcagtggactagctgctggaccagggaggtgtgggagagcggtggcggcgggtacatgcacgtgaagccattgcgagaactttatccataagtatttcaatgccggtagggacggcaagagaggagggcgggatgtgccacacatctttgacctcaggtttctaacgcctgttttctttctgccctctgcagacatccccgattgaaagaaccagagaggctctgagaaacctcgggaaacttagatcatcagtcaccgaaggtcctacagggccacaactgcccccgccacaacccaccccgctttcgtagttttcatttagaaaatagagcttttaaaaatgtcctgccttttaacgtagatatatgccttcccccactaccgtaaatgtccatttatatcattttttatatattcttataaaaatgtaaaaaagaaaaacaccgcttctgccttttcactgtgttggagttttctggagtgagcactcacgccctaagcgcacattcatgtgggcatttcttgcgagcctcgcagcctccggaagctgtcgacttcatgacaagcattttgtgaactagggaagctcaggggggttactggcttctcttgagtcacactgctagcaaatggcagaaccaaagctcaaataaaaataaaataattttcattcattcactcatttattgtcaacatttattgagcacctattacaacaatttcatcgcatggaagacagcatcgtttctgacactgttgtttcatgtatctcttagaaaaacgctgctattagacatctaacactatttatcttgaggtgataaaatatcaaaagccgtgtctcaagatcgatgaaatgcggttaaaatgatgaatagaaactctagggggacctcatatcgatagactcgagactggcacatctggagatccgtatttatccggcttccccttccagatcacgcgaggtttgggatattttgctcaccaggcctcagccaggtaactgaatccagccaaccctggcccatagtctcggaatccgactcggctcccagtccccgcctcggcgttctgagacccccaggctggggttccagagggctgtgaggttgcgaatgactgctgccaaaccggaaggaactctgcggttctctgccacagtgggattgttgcaggcac

SEQ ID NO: 286 - DNA, 1500 bp, Homo sapiens
cctctgcagacatccccgattgaaagaaccagagaggctctgagaaacctcgggaaacttagatcatcagtcaccgaaggtcctacagggccacaactgcccccgccacaacccaccccgctttcgtagttttcatttagaaaatagagcttttaaaaatgtcctgccttttaacgtagatatatgccttcccccactaccgtaaatgtccatttatatcattttttatatattcttataaaaatgtaaaaaagaaaaacaccgcttctgccttttcactgtgttggagttttctggagtgagcactcacgccctaagcgcacattcatgtgggcatttcttgcgagcctcgcagcctccggaagctgtcgacttcatgacaagcattttgtgaactagggaagctcaggggggttactggcttctcttgagtcacactgctagcaaatggcagaaccaaagctcaaataaaaataaaataattttcattcattcactcatttattgtcaacatttattgagcacctattacaacaatttcatcgcatggaagacagcatcgtttctgacactgttgtttcatgtatctcttagaaaaacgctgctattagacatctaacactatttatcttgaggtgataaaatatcaaaagccgtgtctcaagatcgatgaaatgcggttaaaatgatgaatagaaactctagggggacctcatatcgatagactcgagactggcacatctggagatccgtatttatccggcttccccttccagatcacgcgaggtttgggatattttgctcaccaggcctcagccaggtaactgaatccagccaaccctggcccatagtctcggaatccgactcggctcccagtccccgcctcggcgttctgagacccccaggctggggttccagagggctgtgaggttgcgaatgactgctgccaaaccggaaggaactctgcggttctctgccacagtgggattgttgcaggcacgcggctcagacttcactgaggttgggagatgctcctgtccacgctgcctcatcccgtgctggagcactgcacctctatttttttttttagggtacacgccacataacataaaactaaaaattttaaagagtagaattcagtggcatttagtacaatgttatgcaaccatcactcctatctagcccaaaacattttcgtcaactgcataggaggccccattaagcatacctgttaaactcttcttgcctccaactcctggcaactacaaaactccttttgtctctatggatttacctattctgaatatttcttataaatgggatcatacaatatgtgaccttccgtgtctggcttctttcaccaagtgtagtgttttgggggttcattcctgctgcagcatgtatcagtacctcatttcattttatggctgaatcatattccattgtatgaatatactggaaattgctcgtctactcatccagtgatgaacatcgagttgt

SEQ ID NO: 287 - DNA, 2591 bp, Homo sapiens
cggaggtgcgcgggcgcgggcgagcagggtctccgggtgggcggcggcgacgccccgcgcaggctggaggccgccgaggctcgccatgccgggagaactctaactcccccatggagtcggccgacttctacgaggcggagccgcggcccccgatgagcagccacctgcagagccccccgcacgcgcccagcagcgccgccttcggctttccccggggcgcgggccccgcgcagcctcccgccccacctgccgccccggagccgctgggcggcatctgcgagcacgagacgtccatcgacatcagcgcctacatcgacccggccgccttcaacgacgagttcctggccgacctgttccagcacagccggcagcaggagaaggccaaggcggccgtgggccccacgggcggcggcggcggcggcgactttgactacccgggcgcgcccgcgggccccggcggcgccgtcatgcccgggggagcgcacgggcccccgcccggctacggctgcgcggccgccggctacctggacggcaggctggagcccctgtacgagcgcgtcggggcgccggcgctgcggccgctggtgatcaagcaggagccccgcgaggaggatgaagccaagcagctggcgctggccggcctcttcccttaccagccgccgccgccgccgccgccctcgcacccgcacccgcacccgccgcccgcgcacctggccgccccgcacctgcagttccagatcgcgcactgcggccagaccaccatgcacctgcagcccggtcaccccacgccgccgcccacgcccgtgcccagcccgcaccccgcgcccgcgctcggtgccgccggcctgccgggccctggcagcgcgctcaaggggctgggcgccgcgcaccccgacctccgcgcgagtggcggcagcggcgcgggcaaggccaagaagtcggtggacaagaacagcaacgagtaccgggtgcggcgcgagcgcaacaacatcgcggtgcgcaagagccgcgacaaggccaagcagcgcaacgtggagacgcagcagaaggtgctggagctgaccagtgacaatgaccgcctgcgcaagcgggtggaacagctgagccgcgaactggacacgctgcggggcatcttccgccagctgccagagagctccttggtcaaggccatgggcaactgcgcgtgaggcgcgcggctgtgggaccgccctgggccagcctccggcggggacccagggagtggtttggggtcgccggatctcgaggcttgcccgagccgtgcgagccaggactaggagattccggtgcctcctgaaagcctggcctgctccgcgtgtcccctcccttcctctgcgccggacttggtgcgtctaagatgagggggccaggcggtggcttctccctgcgaggaggggagaattcttggggctgagctgggagcccggcaactctagtatttaggataaccttgtgccttggaaatgcaaactcaccgctccaatgcctactgagtagggggagcaaatcgtgccttgtcattttatttggaggtttcctgcctccttcccgaggctacagcagacccccatgagagaaggaggggagcaggcccgtggcaggaggagggctcagggagctgagatcccgacaagcccgccagccccagccgctcctccacgcctgtccttagaaaggggtggaaacatagggacttggggcttggaacctaaggttgttcccctagttctacatgaaggtggagggtctctagttccacgcctctcccacctccctccgcacacaccccaccccagcctgctataggctgggcttccccttggggcggaactcactgcgatgggggtcaccaggtgaccagtgggagcccccaccccgagtcacaccagaaagctaggtcgtgggtcagctctgaggatgtatacccctggtgggagagggagacctagagatctggctgtggggcgggcatggggggtgaagggccactgggaccctcagccttgtttgtactgtatgccttcagcattgcctaggaacacgaagcacgatcagtccatcccagagggaccggagttatgacaagctttccaaatattttgctttatcagccgatatcaacacttgtatctggcctctgtgccccagcagtgccttgtgcaatgtgaatgtgcgcgtctctgctaaaccaccattttatttggtttttgttttgttttggttttgctcggatacttgccaaaatgagactctccgtcggcagctgggggaagggtctgagactccctttccttttggttttgggattacttttgatcctgggggaccaatgaggtgaggggggttctcctttgccctcagctttccccagcccctccggcctgggctgcccacaaggcttgtcccccagaggccctggctcctggtcgggaagggaggtggcctcccgccaacgcatcactggggctgggagcagggaaggacggcttggttctcttcttttggggagaacgtagagtctcactctagatgttttatgtattatatctataatataaacatatcaaagtcaa

SEQ ID NO: 288 - DNA, 1862 bp, Homo sapiens
gcaggtttagcgccactctgctggctgaggctgcggagagtgtgcggctccaggtgggctcacgcggtcgtgatgtctcgggagtcggatgttgaggctcagcagtctcatggcagcagtgcctgttcacagccccatggcagcgttacccagtcccaaggctcctcctcacagtcccagggcatatccagctcctctaccagcacgatgccaaactccagccagtcctctcactccagctctgggacactgagctccttagagacagtgtccactcaggaactctattctattcctgaggaccaagaacctgaggaccaagaacctgaggagcctacccctgccccctgggctcgattatgggcccttcaggatggatttgccaatcttgaatgtgtgaatgacaactactggtttgggagggacaaaagctgtgaatattgctttgatgaaccactgctgaaaagaacagataaataccgaacatacagcaagaaacactttcggattttcagggaagtgggtcctaaaaactcttacattgcatacatagaagatcacagtggcaatggaacctttgtaaatacagagcttgtagggaaaggaaaacgccgtcctttgaataacaattctgaaattgcactgtcactaagcagaaataaagtttttgtcttttttgatctgactgtagatgatcagtcagtttatcctaaggcattaagagatgaatacatcatgtcaaaaactcttggaagtggtgcctgtggagaggtaaagctggctttcgagaggaaaacatgtaagaaagtagccataaagatcatcagcaaaaggaagtttgctattggttcagcaagagaggcagacccagctctcaatgttgaaacagaaatagaaattttgaaaaagctaaatcatccttgcatcatcaagattaaaaacttttttgatgcagaagattattatattgttttggaattgatggaagggggagagctgtttgacaaagtggtggggaataaacgcctgaaagaagctacctgcaagctctatttttaccagatgctcttggctgtgcagtaccttcatgaaaacggtattatacaccgtgacttaaagccagagaatgttttactgtcatctcaagaagaggactgtcttataaagattactgattttgggcactccaagattttgggagagacctctctcatgagaaccttatgtggaacccccacctacttggcgcctgaagttcttgtttctgttgggactgctgggtataaccgtgctgtggactgctggagtttaggagttattctttttatctgccttagtgggtatccacctttctctgagcataggactcaagtgtcactgaaggatcagatcaccagtggaaaatacaacttcattcctgaagtctgggcagaagtctcagagaaagctctggaccttgtcaagaagttgttggtagtggatccaaaggcacgttttacgacagaagaagccttaagacacccgtggcttcaggatgaagacatgaagagaaagtttcaagatcttctgtctgaggaaaatgaatccacagctctaccccaggttctagcccagccttctactagtcgaaagcggccccgtgaaggggaagccgagggtgccgagaccacaaagcgcccagctgtgtgtgctgctgtgttgtgaactccgtggtttgaacacgaaagaaatgtaccttctttcactctgtcatctttcttttctttgagtctgtttttttatagtttgtattttaattatgggaataattgctttttcacagtcactgatgtacaattaaaaacctgatggaacctggaaaa

SEQ ID NO: 289 - DNA, 1775 bp, Homo sapiens
gcaggtttagcgccactctgctggctgaggctgcggagagtgtgcggctccaggtgggctcacgcggtcgtgatgtctcgggagtcggatgttgaggctcagcagtctcatggcagcagtgcctgttcacagccccatggcagcgttacccagtcccaaggctcctcctcacagtcccagggcatatccagctcctctaccagcacgatgccaaactccagccagtcctctcactccagctctgggacactgagctccttagagacagtgtccactcaggaactctattctattcctgaggaccaagaacctgaggaccaagaacctgaggagcctacccctgccccctgggctcgattatgggcccttcaggatggatttgccaatcttgaatgtgtgaatgacaactactggtttgggagggacaaaagctgtgaatattgctttgatgaaccactgctgaaaagaacagataaataccgaacatacagcaagaaacactttcggattttcagggaagtgggtcctaaaaactcttacattgcatacatagaagatcacagtggcaatggaacctttgtaaatacagagcttgtagggaaaggaaaacgccgtcctttgaataacaattctgaaattgcactgtcactaagcagaaataaagtttttgtcttttttgatctgactgtagatgatcagtcagtttatcctaaggcattaagagatgaatacatcatgtcaaaaactcttggaagtggtgcctgtggagaggtaaagctggctttcgagaggaaaacatgtaagaaagtagccataaagatcatcagcaaaaggaagtttgctattggttcagcaagagaggcagacccagctctcaatgttgaaacagaaatagaaattttgaaaaagctaaatcatccttgcatcatcaagattaaaaacttttttgatgcagaagattattatattgttttggaattgatggaagggggagagctgtttgacaaagtggtggggaataaacgcctgaaagaagctacctgcaagctctatttttaccagatgctcttggctgtgcagattactgattttgggcactccaagattttgggagagacctctctcatgagaaccttatgtggaacccccacctacttggcgcctgaagttcttgtttctgttgggactgctgggtataaccgtgctgtggactgctggagtttaggagttattctttttatctgccttagtgggtatccacctttctctgagcataggactcaagtgtcactgaaggatcagatcaccagtggaaaatacaacttcattcctgaagtctgggcagaagtctcagagaaagctctggaccttgtcaagaagttgttggtagtggatccaaaggcacgttttacgacagaagaagccttaagacacccgtggcttcaggatgaagacatgaagagaaagtttcaagatcttctgtctgaggaaaatgaatccacagctctaccccaggttctagcccagccttctactagtcgaaagcggccccgtgaaggggaagccgagggtgccgagaccacaaagcgcccagctgtgtgtgctgctgtgttgtgaactccgtggtttgaacacgaaagaaatgtaccttctttcactctgtcatctttcttttctttgagtctgtttttttatagtttgtattttaattatgggaataattgctttttcacagtcactgatgtacaattaaaaacctgatggaacctggaaaa

SEQ ID NO: 290 - DNA, 1991 bp, Homo sapiens
gcaggtttagcgccactctgctggctgaggctgcggagagtgtgcggctccaggtgggctcacgcggtcgtgatgtctcgggagtcggatgttgaggctcagcagtctcatggcagcagtgcctgttcacagccccatggcagcgttacccagtcccaaggctcctcctcacagtcccagggcatatccagctcctctaccagcacgatgccaaactccagccagtcctctcactccagctctgggacactgagctccttagagacagtgtccactcaggaactctattctattcctgaggaccaagaacctgaggaccaagaacctgaggagcctacccctgccccctgggctcgattatgggcccttcaggatggatttgccaatcttgagacagagtctggccatgttacccaatctgatcttgaactcctgctgtcatctgatcctcctgcctcagcctcccaaagtgctgggataagaggtgtgaggcaccatccccggccagtttgcagtctaaaatgtgtgaatgacaactactggtttgggagggacaaaagctgtgaatattgctttgatgaaccactgctgaaaagaacagataaataccgaacatacagcaagaaacactttcggattttcagggaagtgggtcctaaaaactcttacattgcatacatagaagatcacagtggcaatggaacctttgtaaatacagagcttgtagggaaaggaaaacgccgtcctttgaataacaattctgaaattgcactgtcactaagcagaaataaagtttttgtcttttttgatctgactgtagatgatcagtcagtttatcctaaggcattaagagatgaatacatcatgtcaaaaactcttggaagtggtgcctgtggagaggtaaagctggctttcgagaggaaaacatgtaagaaagtagccataaagatcatcagcaaaaggaagtttgctattggttcagcaagagaggcagacccagctctcaatgttgaaacagaaatagaaattttgaaaaagctaaatcatccttgcatcatcaagattaaaaacttttttgatgcagaagattattatattgttttggaattgatggaagggggagagctgtttgacaaagtggtggggaataaacgcctgaaagaagctacctgcaagctctatttttaccagatgctcttggctgtgcagtaccttcatgaaaacggtattatacaccgtgacttaaagccagagaatgttttactgtcatctcaagaagaggactgtcttataaagattactgattttgggcactccaagattttgggagagacctctctcatgagaaccttatgtggaacccccacctacttggcgcctgaagttcttgtttctgttgggactgctgggtataaccgtgctgtggactgctggagtttaggagttattctttttatctgccttagtgggtatccacctttctctgagcataggactcaagtgtcactgaaggatcagatcaccagtggaaaatacaacttcattcctgaagtctgggcagaagtctcagagaaagctctggaccttgtcaagaagttgttggtagtggatccaaaggcacgttttacgacagaagaagccttaagacacccgtggcttcaggatgaagacatgaagagaaagtttcaagatcttctgtctgaggaaaatgaatccacagctctaccccaggttctagcccagccttctactagtcgaaagcggccccgtgaaggggaagccgagggtgccgagaccacaaagcgcccagctgtgtgtgctgctgtgttgtgaactccgtggtttgaacacgaaagaaatgtaccttctttcactctgtcatctttcttttctttgagtctgtttttttatagtttgtattttaattatgggaataattgctttttcacagtcactgatgtacaattaaaaacctgatggaacctggaaaa

SEQ ID NO: 291 - DNA, 1500 bp, Homo sapiens
ggcctcgcccacaatattaagcttttcatgctttactccctaatctcggatcacacttctgcagtcctttcttaaatacatcaacccaactttaaaccttactcaccctattcattcaagtcttccagtctcccaggccctgcccctcaagtaccctttcctcaagttccgcccctcgacttctccttccctttcccgtaggtaccgcccctcaaatctccctcccctctagcctcggcccccctatttcctctaacttcagcgcccgcccctccagtcccgttcgtctcccttctccacacctcaacgttgcttccctcagtccccgcctctcaatttcctcctgagaaatcaagacacttctctcacgcctgctctctagacctccgcccccccatcagtcccgccttctcttccgccagccagatccgtcctcccctctcgcaggccagacctcgacgtgtctctcgcccgggcccgtttcccgaaaccgtcgctcgtaccagtccataaggctgaagtagtctcgagtggggtcaggtgcctgcagcgctcggcactgtgggcagaagaacctgtcctcccgcccggggccccatgggccgccgcagttccaacagcggggataattgcttcccgcctgcgacgcagcatcgcagcttagcggtctccttctgggaacccctgtcggccaaaacccccacacccggagcaaagccccggctctcccccgccacatctggccggcggcctatctagccgtggtcactcgtggggaaaagcaaagagagcgtctaaccagactaatgttgctgattggctggggagtcgagggggcgggatcacccgaggggaacccgggttctaagttccgctctcccttctaaactacaactcccaggaggcattgaggcggcgcctgacggccacatctgctgctcctcattggtccggcggcaggggagggggttttgattggctgagggtggagtttgtatctgcaggtttagcgccactctgctggctgaggctgcggagagtgtgcggctccaggtgggctcacgcggtgagtcatatggggaacttctgttgggtgtttggtggttcgaatcccatcttaagcgttttgtgcgaacggagtctcctgagcttcgctttgtctgtagttttgagctgaagggggagtgtgtgggcgactctcttccttttcagtagatcatcctcgaggtgaagttcacttcccgtattacttgcaagctgaaacaggcctgaacatacaggataagaagaacagcgttgtattcttcaatatcagagcgaagtgacttcgtaaaaattctatagatgttagaaatcgttgccattctttaggttcaatctataaaatacttatagagaagccagtcttagctactgggcgctgcagggactggaaacgcactgagctgtgtaggaggatgttctgcgtgtccctaaataagtccctaagtaaatgtatgg

SEQ ID NO: 292 - DNA, 1066 bp, Homo sapiens
taccagtccataaggctgaagtagtctcgagtggggtcaggtgcctgcagcgctcggcactgtgggcagaagaacctgtcctcccgcccggggccccatgggccgccgcagttccaacagcggggataattgcttcccgcctgcgacgcagcatcgcagcttagcggtctccttctgggaacccctgtcggccaaaacccccacacccggagcaaagccccggctctcccccgccacatctggccggcggcctatctagccgtggtcactcgtggggaaaagcaaagagagcgtctaaccagactaatgttgctgattggctggggagtcgagggggcgggatcacccgaggggaacccgggttctaagttccgctctcccttctaaactacaactcccaggaggcattgaggcggcgcctgacggccacatctgctgctcctcattggtccggcggcaggggagggggttttgattggctgagggtggagtttgtatctgcaggtttagcgccactctgctggctgaggctgcggagagtgtgcggctccaggtgggctcacgcggtgagtcatatggggaacttctgttgggtgtttggtggttcgaatcccatcttaagcgttttgtgcgaacggagtctcctgagcttcgctttgtctgtagttttgagctgaagggggagtgtgtgggcgactctcttccttttcagtagatcatcctcgaggtgaagttcacttcccgtattacttgcaagctgaaacaggcctgaacatacaggataagaagaacagcgttgtattcttcaatatcagagcgaagtgacttcgtaaaaattctatagatgttagaaatcgttgccattctttaggttcaatctataaaatacttatagagaagccagtcttagctactgggcgctgcagggactggaaacgcactgagctgtgtaggaggatgttctgcgtgtccctaaataagtccctaagtaaatgtatgggatagggtggccagaagtgggtaggagggcatcagtcctccttcggacttaggttttctgcttgaa

SEQ ID NO: 293 - DNA, 1325 bp, Homo sapiens
tcactatgttggccaggctggtcttgaactcctgacctcatgatctgcccgtcttgtcctcccaaagtgcgggactacaggagtgaacccccgcgcctggccccctgtatatatgaaatttaaatgtagtgttgattgtatcagtacatttttggtttcagtcttaatttaaaagaattggacaaatgtaagcttttatgagccccccagctcaattttattgctttttacttatttgtaaccttcagataatttgtttttccctgtagtttatggctgtcagataaaaaactgatctggtgacaatgatctggtgaaaagctcagcccagaagaactataggtctgggctgttaggacttttaatttttggagagcatgtttgccctgtttttttttttttcttttcttttgctgttgtaataggcccatcatttactttttaattttaagtcttgtgccttgaaactcacctttgttgttggacactttctttttgaggtcgtgatgtctcgggagtcggatgttgaggctcagcagtctcatggcagcagtgcctgttcacagccccatggcagcgttacccagtcccaaggctcctcctcacagtcccagggcatatccagctcctctaccagcacgatgccaaactccagccagtcctctcactccagctctgggacactgagctccttagagacagtgtccactcaggaactctattctattcctgaggaccaagaacctgaggaccaagaacctgaggagcctacccctgccccctgggctcgattatgggcccttcaggatggatttgccaatcttggtaagaccctttgttgtatagtatcacgttttgttcagaaaaacacttacagaaagttgtattaccaggtggaaggttctgattggagttgtccaggtttttggcacgttgaacaaataattgaacatcatgcatgaacaagcaatgaaagcatagatttattgaagtggaaggcaatagaagctaaagtacatgtcacaggatgggagcaggcctgagcaagtggctgcagagcccttgtagcaaagtcttctggggttcaagtaccctctagaggtctcccactgtttacatcctatgtaaatgaagtgctggctcacagcccattagaggccaaagtgaattggagctcggccattccaagactggtgtggattgacgccttatgcaaatgaaggtcctagaatggacggatcataggccagagtgcaaattcttccttttttgtttagtttcaggaatttttttttttttttttttggcaacggagtcttgctctg

SEQ ID NO: 294 - DNA, 1129 bp, Homo sapiens
tgtattcttggtggagatggggtttcatcatgttgcagtctggtctcaaactcctgagctcaagcaatacatccatcttggcttcccaaagtgttaggattacaggcataagccacagtgcctggcctagttttagctcttatgtttaattaaggtcctttattcattttaagttttatttatttatttattgagacggagccttgctctgtcaccaggctggattgcaatgtcatgatctcggctcaccgcaacctcctcctcccggtttcaagcgattctcctgcctcagcctcccaagtagctgggattacatgcttatgccaccatgcctggctaatttttgtatttttagtagagatggggtttcaccatgttggccaggctggtctcgaactcctgccctcgggtgatccacccgcctcggcctcccaaagtgctgggattacaggcatgagccaccgtggctggcctaacttttttatttttattttttgtagagacagagtctggccatgttacccaatctgatcttgaactcctgctgtcatctgatcctcctgcctcagcctcccaaagtgctgggataagaggtgtgaggcaccatccccggccagtttgcagtctaagtatgatgttagctgtgggtctttccctttccctttctctttcccttttccttttcctttcccctttcccctttcttttttcctttcctttcctttcccttctgctttcctttcccttccgctttcctttcctttcccttccgctttcctttcctcccctcccctcctctcctctcctcttttctttcctcttctctctcctcttctctcttcctctctcctttctcctctgatatctgaagactaagctgtggatgtttcataaaagttctttctggggtgggtgcagtggctcatgcctgtaatccaagcactttgggaggctgaggtgggcggatcacaaggtcaggagatcgagaccatcctggccaacatggtgaaaccccgtctctactaaaaatacaaaaacaaaattagccgggcgtggtggcaggagcctgtatttccagctagttggtgatagagtgagactctgactcaaaagaaaaaaaaaatgcttt

SEQ ID NO: 295 - DNA, 1125 bp, Homo sapiens
gcgcagtctcagctcactgcagcctcgacctcctgggctcaagcgatcctcccacctcagcctcctgagtagctgagaccacagggacccaccaccacaccctgctgattttttattttttgtagagatagggtttcaccatgttgcccagactaatttttaaattcttggtagagatgggtgccccctatgttgcccaggctggtcatgagctcctggggtcaagtgatcctcctgccttagccttccaaagggctgagattacaggtgtgagccactgtgcctggccatgtggttatagataaactgccatttgttaaactcattggtaatgttgttttttctctcctaatttttaatcttgtaaaatcttgataagcagattgataattctgattgccttcttaggctattttcctacaattagcatttatgagcaatttttaaacgtttgatacatgaaattcaacagccctctgatgcatgcttttatattacagaatgtgtgaatgacaactactggtttgggagggacaaaagctgtgaatattgctttgatgaaccactgctgaaaagaacagataaataccgaacatacagcaagaaacactttcggattttcagggtaggtaatgaatacccatgtatctaggagagctggtaatttggtcattgtttttagatattttcccactataaatctctgctattcaaagtctgaaacaaaatgttctctattttaggaagtgggtcctaaaaactcttacattgcatacatagaagatcacagtggcaatggaacctttgtaaatacagagcttgtagggaaaggaaaacgccgtcctttgaataacaattctgaaattgcactgtcactaagcagaaataaaggtaatattattatcttatggttactggaattttttttttccactctctcataggaggaaaatttgtcctgtccttacagaatatggtttaagtgagtaaagatgagtaagttgctgggcgtggtggctcacacctgtaatcccagcactttgggaggctgaggcggatggatcacctgaggtcaggagttcgagaccagcctgacccacatggagaaaccctgtctctactaaa

SEQ ID NO: 296 - DNA, 1148 bp, Homo sapiens
ccttccaaagggctgagattacaggtgtgagccactgtgcctggccatgtggttatagataaactgccatttgttaaactcattggtaatgttgttttttctctcctaatttttaatcttgtaaaatcttgataagcagattgataattctgattgccttcttaggctattttcctacaattagcatttatgagcaatttttaaacgtttgatacatgaaattcaacagccctctgatgcatgcttttatattacagaatgtgtgaatgacaactactggtttgggagggacaaaagctgtgaatattgctttgatgaaccactgctgaaaagaacagataaataccgaacatacagcaagaaacactttcggattttcagggtaggtaatgaatacccatgtatctaggagagctggtaatttggtcattgtttttagatattttcccactataaatctctgctattcaaagtctgaaacaaaatgttctctattttaggaagtgggtcctaaaaactcttacattgcatacatagaagatcacagtggcaatggaacctttgtaaatacagagcttgtagggaaaggaaaacgccgtcctttgaataacaattctgaaattgcactgtcactaagcagaaataaaggtaatattattatcttatggttactggaattttttttttccactctctcataggaggaaaatttgtcctgtccttacagaatatggtttaagtgagtaaagatgagtaagttgctgggcgtggtggctcacacctgtaatcccagcactttgggaggctgaggcggatggatcacctgaggtcaggagttcgagaccagcctgacccacatggagaaaccctgtctctactaaaaatacaaaataagccgggcatggtggtgcatgcctgtaatcccagctattcgggaggctgaggcaggagaatcgcttgaacccgggaggcagaggttgcagtgagccaagatcgtgccattgcactctagcctgggcaacaagagtgaaactctgtctcaaaacaaaaaaaaagatgagtaagttagcactcaagattcaactttgccgtcctagttgcattgtaaaattatgaaaaagttccatccagacagatttttaaggttt

SEQ ID NO: 297 - DNA, 1091 bp, Homo sapiens
aatacttaataccggatatataaaggtataaatggctgagagatgataatacccgtatggtgatactgatggcctaattttcattgggatatttacttgcctagaccattttttctaggctcagactgatggattgctttttgattctgggcctgttgtaaatctgcatgggcattttatattagtgtaattgattgatattctgaggtcaaggaatataaataatgttgtgttacggattttttgcactagtttcagagtgatgcttatagttccattgaagcatgaaatttgactatcatttatttctcaagggctttacaatatgtattagcccactaatacctattatattacatacatactaatttccttaaggttacatgttaaatgtagttaaaaacagttcttatattccatatgatgaataaattttagaatcagtgatcgcctcttgtgaataaattaatgaaacccatttctactcttttcttccttagtttttgtcttttttgatctgactgtagatgatcagtcagtttatcctaaggcattaagagatgaatacatcatgtcaaaaactcttggaaggtaaattattttcttatataaatgcacttaattttttcactatacatttgtgattggtggtttctcatttctgattttataacactcattatgtattgataacatttgtatggtatctatttgtgtattattttttatttttatttttgtgtgttatttcacacagtcattttaatttatttttattttatttctttgtgagacagggtgttgctctgttacccaggctggagggtagtggcacgatcagagctcactgtggccttgatctcccaggtcaagggagatcaggcatgcagcaccatgcacaactaatgtgtgtttttgttttttagagttggggttgcgctgtgttgccagggctggtcttgaactcctgggctcaacccatcctcctgccttagcctcccaaagtgctgagattagtagcgtgagccaccatgcccagccaaatatttctttttttatttcctgtgtgtgtgtgtgtgtgtgtgtgtgtg

SEQ ID NO: 298 - DNA, 1109 bp, Homo sapiens
atttgatttagggtgcaacttatgtcatcaactgcttatgcacttcctttgaagatggagaataagaaggaaagaaatttatccattaaagttattcatttgcagattctgtttaccgttatttgtttgttttgggcacttatttttgaccagggaggactgtttctagttaatgtttttctgacctctcggatacgtagtttctctctcatttttctcttagtatctttctgggaatttcacaatccagggctacagtaagacccatgtttgtattgctgggctcagaaatggaatttggagctgacttagtgtttttggctgttaagcccttgacattttacactggtgaagtttcactgtgtcctctgcaaacagggacaatggaaaggctgttatatggaatgtctgtaaattctaatacttgaagtggacccaggagtggtaggtctcataattaaaaacattcagacaatcactatctttgtttttccctctagtggtgcctgtggagaggtaaagctggctttcgagaggaaaacatgtaagaaagtagccataaagatcatcagcaaaaggaagtttgctattggttcagcaagagaggcagtaagtaccaataaaaggctgatcaccttttattaacacgtcttcataacttcccaaaataatcttagattgatgatttttaaactcaggaataaccccctgcttagatggatgaatttgtgagtatcaaagaacatggaaaattttggggcatctttgattaatctagaaacttttacttatagataatttggttccaaaagtatttaattgtacataataatgagcatagtgggaagtttttttttttcttcttccaagttcaaagtcgttacaagattgtttttacaataaatgacaggaaattagagaaaaaaattcagccataatccccactgtaaccccacagctgttttcagttttccttttccttctagattttgttcagatgaaatcgtgtttttagatggttgaaatcatcttgtatatacagttttgtattttgcttttccacaaatgcattatagcatagacttttgcctaatacatcctttttgatg

SEQ ID NO: 299 - DNA, 1054 bp, Homo sapiens
ctctattagcagaaatttgacttcacattttctttatatagtttaattgaacaccttcttgttcatgttttttgtttatcattttaatgaataaaaatagttccatagctaataagtagggtttactaattaaaatgaacacagtggaaacacacttgtttctgactgtggagactagggcaagtggcttctgttttctgagccttggttgccccatctgtaagatggggattctgaggcttatgagacatgatctctgtaaataaagagcttggcacagggcctggccatttattgagtgcttactatttgccaagcattttacaaagttattttaggtgaggtatttaagtcattgacctgggctttgatttctttgtataagtagagctgggtttggaactcaggcagccttgagtcaactgagtttaactgtaaatgtttttttaaatattggcaattattattactaataaactctgttattctgtttatcaaaggacccagctctcaatgttgaaacagaaatagaaattttgaaaaagctaaatcatgtaagtattattatatgactcatacttagatttatctatctcaaaatatgagaagagtataaagcctttcagtataataaagataatattggccaggtgtggtggctgatgcctgtaaccctagcactttgggaggccgaggtgggtgaatcacctgaggtcaggagtttgagaccagcctggccaacatggtgaaaccctgtctactaaaaatacaaaaatttagctgggcatggtggcacatgcctgtaatcccaactacttgggaggctgaggcaggagaagtgcttgaacctgggaggcagagattgcagtgagccaagatcgcgccactgcactccagcctgggcgacagagtgagactgtctcagaaaaaaaaacaagaaaaattaaaagaataaataaagctaatattaacctgggttctttaacttatgtgtacattcacacacatgcctagctgtcatttagctgggaagagttttaccccaaaatgttac

SEQ ID NO: 300 - DNA, 1062 bp, Homo sapiens
ttagaattttcctcttcctttgaaaaatggtaggatcttgttccatggggtccaattgcctggaggttccagttgcccagagcttaaataacccttgtttggcagcatggctgggctcctacttgacagcttttattcatgctacttgtcagtctccctcagggttccttaggctgtccttgagtacctctgctctggggtagtgaggaagaagactgggaagagacctagccttcattcccaggtagcatccttgcatatgaaatatgaactagtctctcaccatcatggtggggtggaaaatttcttgcatgttctcactgaggagttggctagattctgtctgccttctcccctgattgaacttccaagcctctgaggcagggggccagatgcctgttcttggcctccctgtccctctgggcagatgttctaagctcttgtggttttcctcttgggagtttctcactactttcccttttttctccccctcttcttagccttgcatcatcaagattaaaaacttttttgatgcagaagattattatattgttttggaattgtaagtagtaaactttttaaaaatttctgtttccattcaaatgctttataaagccaccaaagaatctaatgtaggcttgcctttctcatcctggggggcctcaacgtatgtatgtagtagtggggcccacaaagtctgtgtatagggggttaatatcaacccaaaaaaccctccaatgtttccaaaaataggtggtatgggattccaggtcctggatctatgatcaggacttgaactccactctgcagttgactagctgaccacccatgggtcagtttaactcacttttctgagtctcatcttcatagtgttaaatggggattataatgaacccccacatgcagagtccttgtatgaattaaatgctatgagggatggaaatcccccagcagagcacctggcacatgtgtgtactcaccatggggcaatattgttataattggctcaccataactgtgggtttttacatccgtgtattcaaccaacctcagatcgaaaat

SEQ ID NO: 301 - DNA, 1100 bp, Homo sapiens
tttgagaccaacctggccaacatggcaaaaccttgtctctactaaaaaaaatacaacaattagccgggcatggtggtgcatacctgtaatcccagctacttgggaggctaaggcatgagaatcacttgaacctgggaagcggaggttgcagtgagccaagatcgcaccactgcactccaacctgggtgacagagcgaggctctgtctcaaaaaaaaaaaaaaaaaagcaactcctgggccccacttccaagctactgaattggattttttaaagttccccaggtgcctccaatgcccaatcctttcatctcattccttagtttccaactgggacatctgattgtgaataaaccttattagttttaaaaatgagagtcaaaagtgaataaaaatgtcaactgtttgcttgtcttaatgaatttgttttgttgttttattgtcttctgtccaagtgcgttttcccccaggaatgaaccccttgccttgcctttgtgtttcaggatggaagggggagagctgtttgacaaagtggtggggaataaacgcctgaaagaagctacctgcaagctctatttttaccagatgctcttggctgtgcaggtaaaagaagccctcaattcttttgacagctgcctttcttttagttgaattactccctgaattaggcagaaatcgagggaccgtggattaaaactcagaagagaatctgtgtgtttgctgttctcttcttggcaaaaatgtcctactcctttcactgagatgaaaaagctctcactggcgaggcgcggtggttcatgcccataatcccagcattttgggaggccaagcgggcggatcacgaggtcaagagatcaaaaccatcctgaccaacatagtgaaaccccatctctactaaaaatacaaaaattagctgggtgtagtgttgcgtgcctgtagtcccagctactcgggaggctgaggcaggagaatcacttgaactgggaggtggaggttgcagtgtgctgagatcatgccactgtgctccagcctggggacagagtgagactccatctcaaaaaaaaaaaaaaaaaaaaaagaaaaagctctcactgtgtagctta

SEQ ID NO: 302 - DNA, 1087 bp, Homo sapiens
gacaaagtctttgcattgaggaataggttaactcacataaacagatatatatttgtatcacataaatagatatttacaaatatatatttgtataggttccctttaaaaatattctcaggactgcaataaccaaatatatcattttggtggaatttttgtgtttatttggtatgttctcaaaacattttctgttacccatttgaatttttattgaaattgacaccttacatttctgctgtgtgaagagttgtttattatcttaaagtgaaatgaaaggttaattgttctaagttgcttttttcatttccctgctttttaaagatcttctcaaacaaatttgtaaactttaccccaacagttttctatgattttggagaatatggttgtgtgtatcacggcttacggtttcacccagctgtgagatgtgtgtgttggtaactttgattctacttaagtatctactgcatgaatctgagggtcatgcctgcctttctgtgtagtaccttcatgaaaacggtattatacaccgtgacttaaagccagagaatgttttactgtcatctcaagaagaggactgtcttataaaggtaagaaattggcattctgtatgtggctattcctgtagattcttgttcagaaacttttaattcctcaaataaaaagtgggagcgtaaaaaggatgagaatctgaccctttcactgttaccaattattttagagatcaggtgatactgctcttatccagattcgaatgagcatttattgagctctgttgtgtacaagtgacctttgtgcttagagagagaggaggggtctaaatggacgagtgggctgggtatggtggctcacacctgtaatcccagcactttgggaggccgaggtgggcagatcacctgaggtcaggagtttgagaccaacctggccaacatggcaaaaaatacaaaaatttagctgggcatggtggtgggtgtctgtaatcccagctacttgggaggctgagacacgagaatcacttgaacctgggaggcagaagttgcagtgagctgagatcgcaccactgcactccagcctgtgcaaaagggccaga

SEQ ID NO: 303 - DNA, 1164 bp, Homo sapiens
aatgagtaatcacatgcgctgcctttccctgtttctcaagtctggcatcactttagaatctcttgttaggatttatgacacccaggctttacctcagaagctgagagtggcactcaggtataagcatgtgtttccaagctccccaggtattccatagcgcagccaagtttgagacactggggtctaagaaccatgtagaactaattagaatcctgaagtgtctgtgataaagataataagctttttgtaagattacagaggacataggttaagttggaaagcctgagtgttgagattcctaggctcaggaattttaatttaagcaaaattaaatgtcctaacttgcaaagacatgaatctgtaaattccagattaatggcaggtgtgaattgtacaatagaaactgatctagcctacgtgtcttcttggactggcagactatgttaatctttttattttatggcaagttcaacattattcccttttgtactgaattttagattactgattttgggcactccaagattttgggagagacctctctcatgagaaccttatgtggaacccccacctacttggcgcctgaagttcttgtttctgttgggactgctgggtataaccgtgctgtggactgctggagtttaggagttattctttttatctggtaagaaatattttcattgctgcacagactggtaggaggtgattagatgaagtcacaaatgtgtcttgctctgttgtccaggctggcatgcagtggcttgatcttggctaactgtagcctctgcctcctgggtcaagtgatcctcccacctcagcctcccgagtagctgggactacagatgcacaccaccatgcccagctaatttttctattttttgtagtgatggggttttgccatgttgcccaggctggtctcgaactcctgggctcaagtgatcctcctgcctcggcctcccaaagtgctgggattacaagcctaaggcattgtgcccagcctagctcactttttgaccattgatttaaagaaaaatctgacttttcattatgctgaaaaagaaatctttatatctgaatgccactgagaatgccacttgatttcttttcctttctctctctaccaatattaagccttagtgggtatccacctttctctgagcatag

SEQ ID NO: 304 - DNA, 1116 bp, Homo sapiens
ctgctggagtttaggagttattctttttatctggtaagaaatattttcattgctgcacagactggtaggaggtgattagatgaagtcacaaatgtgtcttgctctgttgtccaggctggcatgcagtggcttgatcttggctaactgtagcctctgcctcctgggtcaagtgatcctcccacctcagcctcccgagtagctgggactacagatgcacaccaccatgcccagctaatttttctattttttgtagtgatggggttttgccatgttgcccaggctggtctcgaactcctgggctcaagtgatcctcctgcctcggcctcccaaagtgctgggattacaagcctaaggcattgtgcccagcctagctcactttttgaccattgatttaaagaaaaatctgacttttcattatgctgaaaaagaaatctttatatctgaatgccactgagaatgccacttgatttcttttcctttctctctctaccaatattaagccttagtgggtatccacctttctctgagcataggactcaagtgtcactgaaggatcagatcaccagtggaaaatacaacttcattcctgaagtctgggcagaagtctcagagaaaggtatgaatatgaaagggttaagaatttgtggtatgctaaaatgtgtatgtgctgtggtgggagtttcttcccaaattccatggtgttttctcctgtcaattctgttcttattttctattgttagtttcacaccatttgagaggcactggaaattattaagagcatgcactcaggtcctgggtctgctactacttagctgtgtggccttaggcaagttatttaacctccatctccaatttctttctgtgtaaagggaccctcaataaaccctaccttaaaaggtttttgtgagggttaagtatcatgtacacaagtgcctggtacctattttagtgagcaaaataaatgcacttgtaactttttagttacaaggtttcctttgagtaagcaagcatgtaaaaactagatgtcattagttaccttgtattttataatttatcctggcaactttagttccctgaagagaaagtagaaaattaaatgtcaaataacataacata

SEQ ID NO: 305 - DNA, 1086 bp, Homo sapiens
gttaaatgtcagaatatttaaggaataataatgttgtaatatacaggccagcgtgcatttgttgcttgctggagtagccaagttttatttctgacaagtctgcagttccagggagcctctccctcgctgagtaactgtcacctatccatctgtagatgtcagagagagtttgctgtgcatcccaagtatcttagaattgggtagaagtttagctttaattagtccgaccttgagtctagcaacaagagagggaacaggcagtgaagaggtcgtgactgacgtcccagcagcaggagacagggagtgtcattatcattcctggtcttctcacagtactctgaatacagagagtgaggaagattagggggccctgtctgctgactccgtgatgatctcagaccctctctgctctttctgaatggtggcctgttaattctggcatactcttactgataatatatttatccttttcactgtgatttgcccaattgttgctttagctctggaccttgtcaagaagttgttggtagtggatccaaaggcacgttttacgacagaagaagccttaagacacccgtggcttcaggtgggtgtgggacagtgcctgctagcataaaatacatgggaagccctgctgcctgagagacatgagacagaggacagaaacatgtttactttgttgagtgtttaatctaattgttttagatgtatggggggtatcttggaggatgggttacaacctgttttatttttttttttgagacaggttcttgttctgtcaccctggctggagtgcagtggcacgatctcagctcactgcaacctctggcccccgggttcaagtgattctcctgcctcagcctcccaagtagctgggattacaggtgcatgctgccatgcccagctactttttgtattttttgtagagatggggtttcgccgtgctggccaggctacaacctttttgatattactcatggctgttggatgtacacgctcactttatgtcctgttctggttccacttggctgccccgagtctcctgtttggcctgtgttcttttgagtgcttgttctggctctaccc

SEQ ID NO: 306 - DNA, 1081 bp, Homo sapiens
gtgggcttaagtacttctgaaaatttgtatggcatctgctgggtgaattttcctagggtgctgggctggttgttaggacagtctgggtgactggcctcattcatggcaggggcagcaggtggagagtggtccgggaaggatttgaggagctgcacggagtcaggcccagcctctggcctcctgattgccacctttctcaggatcttggatactaattaagaaactcttgactgctggaggctgtgattgacccactgagagcttttaggcatgtggatgtgagtcagccaggattgatggagcattgactgctaattagactcctctgggaaggtagaggcgggcaacacataatgccttcgctgtgggagcttcatcaaggggatgattcttggacggacatttttcctccctctttccacaggggcatgctagccctgtcattctaggagtttattatccttcagacacagctacttatgtttttaattccctcacaggatgaagacatgaagagaaagtttcaagatcttctgtctgaggaaaatgaatccacagctctaccccaggttctagcccaggtattcgtattcctgatgatcactaaatgtagtctgggcttaaggagctgataagcaaagatgatgaaattcaagattttcctgagtagcaattgcttaacattgtttcagttataatgtagtagaaactctgttttaacttgattcgctccagcacccttagatttaaaaatgcaggatatgtttaatatctaacacataatagaccgataagcacagctagggattgtcatccaaaaggtcacctgcaaggcaatttcgaaagactctattagaggctcaaatataaatttgttgaacaaattaaaatttgggtcagtagttgattccttgattacaattttattctttaaagttctttgtgagtataagttaattccagtcctgcttttttgttgttgttgttgttgttgaatggtagctgtcctttttcccactgtttcctccccccaattttttttttcttgagacagagtcttggtttgtcactcaggccggag

SEQ ID NO: 307 - DNA, 1244 bp, Homo sapiens
atgttggtcaggcttgtctcgaacttttgacctgaagcgacctgcccacctcggctttccaaagtgctgggattacagctgtgagtcaccgcacccagccttcctcccaattttatatatgggaaaacaactaaggcacaaaggttgtcttcccgcaaaagaccaagacttggggcttcaactgagaggtattatagtccttttaaacttgatatttagaagaggacgatcaagaggaagttggttatgctacttgctttcagtatacatcgttcagaggtcagaagccataagggagagaaatatctattagataagcatgtctgagttgggggctgtggtgaggactcagttgtcaatgatgacaaccagtaatttttggttctagaatttcacatcaaatgcccccactttactggaagcatattgaggaactttgataatcttaaagaagccagtgattttcttttgaacatttctccattttcctttattttcagccttctactagtcgaaagcggccccgtgaaggggaagccgagggtgccgagaccacaaagcgcccagctgtgtgtgctgctgtgttgtgaactccgtggtttgaacacgaaagaaatgtaccttctttcactctgtcatctttcttttctttgagtctgtttttttatagtttgtattttaattatgggaataattgctttttcacagtcactgatgtacaattaaaaacctgatggaacctgggctttgtgcttctgcttgataatcggttctttagttgaatggctttattatttatttatttgagatggagtctcactctgttgcccagcctgaatgaagtgcagtggtgcaggcttggctcactgcaacctctgcttcccaggttcaagcgattcttgtgcctcagcctcctgagtagctgggattacaggtatgcaccaccatgcctgttaatttttatatattttgtagagacagggttttgccatgttggccagcctggtcttgaacttctgacctcaggtgatctgtctgcctcagtctcttaaagtgctgggattacacgcatgagccactgagcctagcctgaatggcttttttatatttaaagttgtgtgcctttcatctggagctacaccttggctatcactaggcaggtttcccaggatgtcaccctggtctcagcctgtgagagctgaatacaaattctaagggccccttggaaagttccagggaaggga

SEQ ID NO: 308 - DNA, 1500 bp, Homo sapiens
ttatgctacttgctttcagtatacatcgttcagaggtcagaagccataagggagagaaatatctattagataagcatgtctgagttgggggctgtggtgaggactcagttgtcaatgatgacaaccagtaatttttggttctagaatttcacatcaaatgcccccactttactggaagcatattgaggaactttgataatcttaaagaagccagtgattttcttttgaacatttctccattttcctttattttcagccttctactagtcgaaagcggccccgtgaaggggaagccgagggtgccgagaccacaaagcgcccagctgtgtgtgctgctgtgttgtgaactccgtggtttgaacacgaaagaaatgtaccttctttcactctgtcatctttcttttctttgagtctgtttttttatagtttgtattttaattatgggaataattgctttttcacagtcactgatgtacaattaaaaacctgatggaacctgggctttgtgcttctgcttgataatcggttctttagttgaatggctttattatttatttatttgagatggagtctcactctgttgcccagcctgaatgaagtgcagtggtgcaggcttggctcactgcaacctctgcttcccaggttcaagcgattcttgtgcctcagcctcctgagtagctgggattacaggtatgcaccaccatgcctgttaatttttatatattttgtagagacagggttttgccatgttggccagcctggtcttgaacttctgacctcaggtgatctgtctgcctcagtctcttaaagtgctgggattacacgcatgagccactgagcctagcctgaatggcttttttatatttaaagttgtgtgcctttcatctggagctacaccttggctatcactaggcaggtttcccaggatgtcaccctggtctcagcctgtgagagctgaatacaaattctaagggccccttggaaagttccagggaagggagcatagcgaggttgggggtggagtttgtagagactggctggctggctgcagacatcttcatgagaacagcaggtaccttggtgcatgataacaggccaggttatattctcatcctcgccctcataaagatacaggtctaccgtctctgaaacctttgggctagataagttgtgaaatttaattatccaattttaggaaggtggtaaggcatatctactatgtgtatgtgtagcaccccagtggagtcctacacatgtggagtcctaccccagtggagaccaaacatgttaatatttccacagcaaatattcacagtaagagggatagagaaagattataggtagttgcatattggttcatatcagtcttttcttccaaatgagctacaatgacttgtttttgagagctgtttgggttttggaagtggagataaggcatgtggttatgtcttgttgacccaataatgaccagggaggccctgtgcaaagacttacccttgg

SEQ ID NO: 309 - DNA, 3814 bp, Homo sapiens
agctcggtgcacggcgcgctgattggctggatccgccatgcggagcggctaggtggtgcacgggaaacgcgggcgtaggtgaccggcggctttctcagttttggtggagacgggcgcatgtgggcgctttgctcgctgctgcggtccgcggccggacgcaccatgtcgcagggacgcaccatatcgcaggcacccgcccgccgcgagcggccgcgcaaggacccgctgcggcacctgcgcacgcgagagaagcgcggaccgtcggggtgctccggcggcccaaacaccgtgtacctgcaggtggtggcagcgggtagccgggactcgggcgccgcgctctacgtcttctccgagttcaaccggtatctcttcaactgtggagaaggcgttcagagactcatgcaggagcacaagttaaaggttgctcgcctggacaacatattcctgacacgaatgcactggtctaatgttgggggcttaagtggaatgattcttactttaaaggaaaccgggcttccaaagtgtgtactttctggacctccacaactggaaaaatacctcgaagcaatcaaaatattttctggtccattgaaaggaatagaactggctgtgcggccccactctgccccagaatacgaggatgaaaccatgacagtttaccagatccccatacacagtgaacagaggaggggaaagcaccaaccatggcagagtccagaaaggcctctcagcaggctcagtccagagcgatcttcagactccgagtcgaatgaaaatgagccacaccttccacatggtgttagccagagaagaggggtcagggactcttccctggtcgtagctttcatctgtaagcttcacttaaagagaggaaacttcttggtgctcaaagcaaaggagatgggcctcccagttgggacagctgccatcgctcccatcattgctgctgtcaaggacgggaaaagcatcactcatgaaggaagagagattttggctgaagagctgtgtactcctccagatcctggtgctgcttttgtggtggtagaatgtccagatgaaagcttcattcaacccatctgtgagaatgccacctttcagaggtaccaaggaaaggcagatgcccccgtggccttggtggttcacatggccccagcatctgtgcttgtggacagcaggtaccagcagtggatggagaggtttgggcctgacacccagcacttggtcctgaatgagaactgtgcctcagttcacaaccttcgcagccacaagattcaaacccagctcaacctcatccacccggacatcttccccctgctcaccagtttccgctgtaagaaggagggccccaccctcagtgtgcccatggttcagggtgaatgcctcctcaagtaccagctccgtcccaggagggagtggcagagggatgccattattacttgcaatcctgaggaattcatagttgaggcgctgcagcttcccaacttccagcagagcgtgcaggagtacaggaggagtgcgcaggacggcccagccccagcagagaaaagaagtcagtacccagaaatcatcttccttggaacagggtctgccatcccgatgaagattcgaaatgtcagtgccacacttgtcaacataagccccgacacgtctctgctactggactgtggtgagggcacatttgggcagctgtgccgtcattacggagaccaggtggacagggtcctgggcaccctggctgctgtgtttgtgtcccacctgcacgcagatcaccacacgggcttgccaagtatcttgctgcagagagaacgcgccttggcatctttgggaaagccgcttcaccctttgctggtggttgcccccaaccagctcaaagcctggctccagcagtaccacaaccagtgccaggaggtcctgcaccacatcagtatgattcctgccaaatgccttcaggaaggggctgagatctccagtcctgcagtggaaagattgatcagttcgctgttgcgaacatgtgatttggaagagtttcagacctgtctggtgcggcactgcaagcatgcgtttggctgtgcgctggtgcacacctctggctggaaagtggtctattccggggacaccatgccctgcgaggctctggtccggatggggaaagatgccaccctcctgatacatgaagccaccctggaagatggtttggaagaggaagcagtggaaaagacacacagcacaacgtcccaagccatcagcgtggggatgcggatgaacgcggagttcattatgctgaaccacttcagccagcgctatgccaaggtccccctcttcagccccaacttcagcgagaaagtgggagttgcctttgaccacatgaaggtctgctttggagactttccaacaatgcccaagctgattcccccactgaaagccctgtttgctggcgacatcgaggagatggaggagcgcagggagaagcgggagctgcggcaggtgcgggcggccctcctgtccagggagctggcaggcggcctggaggatggggagcctcagcagaagcgggcccacacagaggagccacaggccaagaaggtcagagcccagtgaagatctgggagaccctgaactcagaaggctgtgtgtcttctgccccacgcacgcacccgtatctgccctccttgctggtagaagctgaagagcacggtcccccaggaggcagctcaggataggtggtatggagctgtgccgaggcttgggctcccacataagcactagtctatagatgcctcttaggactggtgcctggcacagccgcgggccaggaggctgccacacggaagcaagcagatgaactaatttcatttcaaggcagtttttaaagaagtcttggaaacagacggcggcacctttcctctaatccagcaaagtgattccctgcacaccagagacaagcagagtaacaggatcagtgggtctaagtgtccgagacttaacgaaaatagtatttcagctgcaataaagattgagtttgcaattgtgagttcttttgcttcctcctgctgctgctacagagcagggtctgctgtgcaccaccttggagaaggctctctgtgctgtagtgtggcagctgcctggtacccgggtggcttggaagaagtcagctcccgtcgtagtgagcacctctggaacctgtcctcagagagccacccttattcgccaagtctttttgacaactcgagctgtgccagctcacagcagggcgtgctttctctatcaatcaatcaatcaatcaatcaaatcaatcagtgagagcctggctgggctggtgtcattggtcagggaaatgcaagtcttctggtggttctgggtaaaagtggagacaatagatttgctgtgttgttgcttccatactgagaggagtgaggatcactttgccctcgaaggttttgagaaatggcacacggggctggtttccattgtcctccttgcgggatttacagacgtggattagtgctcgacaaatggagagcattttccaaggaagtaagtaagtaaagtaagtaagtaagtaagtaagttgaatctagtatttattgtgtatattccctacccaggagaatgtaaaaagaagagctttaaaaactcaaaagacaagcaagcgagagatcagccagggacctggctttacacaggtggtgaccttcaggctccatcccggtgtgcatttgagattgacggccatgtccccgcaggtttattaaagcaagaacagatgccaagctcagggataataaatctattttaataacgttaaaaaaaaaaa

SEQ ID NO: 310 - DNA, 3811 bp, Homo sapiens
agctcggtgcacggcgcgctgattggctggatccgccatgcggagcggctaggtggtgcacgggaaacgcgggcgtaggtgaccggcggctttctcagttttggtggagacgggcgcatgtgggcgctttgctcgctgctgcggtccgcggccggacgcaccatgtcgcagggacgcaccatatcgcaggcacccgcccgccgcgagcggccgcgcaaggacccgctgcggcacctgcgcacgcgagagaagcgcggaccgtcggggtgctccggcggcccaaacaccgtgtacctgcaggtggtggcagcgggtagccgggactcgggcgccgcgctctacgtcttctccgagttcaaccggtatctcttcaactgtggagaaggcgttcagagactcatgcaggagcacaagttaaaggttgctcgcctggacaacatattcctgacacgaatgcactggtctaatgttgggggcttaagtggaatgattcttactttaaaggaaaccgggcttccaaagtgtgtactttctggacctccacaactggaaaaatacctcgaagcaatcaaaatattttctggtccattgaaaggaatagaactggctgtgcggccccactctgccccagaatacgaggatgaaaccatgacagtttaccagatccccatacacagtgaacagaggaggggaaagcaccaaccatggcagagtccagaaaggcctctcagcaggctcagtccagagcgatcttcagactccgagtcgaatgaaaatgagccacaccttccacatggtgttagccagagaagaggggtcagggactcttccctggtcgtagctttcatctgtaagcttcacttaaagagaggaaacttcttggtgctcaaagcaaaggagatgggcctcccagttgggacagctgccatcgctcccatcattgctgctgtcaaggacgggaaaagcatcactcatgaaggaagagagattttggctgaagagctgtgtactcctccagatcctggtgctgcttttgtggtggtagaatgtccagatgaaagcttcattcaacccatctgtgagaatgccacctttcagaggtaccaaggaaaggcagatgcccccgtggccttggtggttcacatggccccagcatctgtgcttgtggacagcaggtaccagcagtggatggagaggtttgggcctgacacccagcacttggtcctgaatgagaactgtgcctcagttcacaaccttcgcagccacaagattcaaacccagctcaacctcatccacccggacatcttccccctgctcaccagtttccgctgtaaggagggccccaccctcagtgtgcccatggttcagggtgaatgcctcctcaagtaccagctccgtcccaggagggagtggcagagggatgccattattacttgcaatcctgaggaattcatagttgaggcgctgcagcttcccaacttccagcagagcgtgcaggagtacaggaggagtgcgcaggacggcccagccccagcagagaaaagaagtcagtacccagaaatcatcttccttggaacagggtctgccatcccgatgaagattcgaaatgtcagtgccacacttgtcaacataagccccgacacgtctctgctactggactgtggtgagggcacatttgggcagctgtgccgtcattacggagaccaggtggacagggtcctgggcaccctggctgctgtgtttgtgtcccacctgcacgcagatcaccacacgggcttgccaagtatcttgctgcagagagaacgcgccttggcatctttgggaaagccgcttcaccctttgctggtggttgcccccaaccagctcaaagcctggctccagcagtaccacaaccagtgccaggaggtcctgcaccacatcagtatgattcctgccaaatgccttcaggaaggggctgagatctccagtcctgcagtggaaagattgatcagttcgctgttgcgaacatgtgatttggaagagtttcagacctgtctggtgcggcactgcaagcatgcgtttggctgtgcgctggtgcacacctctggctggaaagtggtctattccggggacaccatgccctgcgaggctctggtccggatggggaaagatgccaccctcctgatacatgaagccaccctggaagatggtttggaagaggaagcagtggaaaagacacacagcacaacgtcccaagccatcagcgtggggatgcggatgaacgcggagttcattatgctgaaccacttcagccagcgctatgccaaggtccccctcttcagccccaacttcagcgagaaagtgggagttgcctttgaccacatgaaggtctgctttggagactttccaacaatgcccaagctgattcccccactgaaagccctgtttgctggcgacatcgaggagatggaggagcgcagggagaagcgggagctgcggcaggtgcgggcggccctcctgtccagggagctggcaggcggcctggaggatggggagcctcagcagaagcgggcccacacagaggagccacaggccaagaaggtcagagcccagtgaagatctgggagaccctgaactcagaaggctgtgtgtcttctgccccacgcacgcacccgtatctgccctccttgctggtagaagctgaagagcacggtcccccaggaggcagctcaggataggtggtatggagctgtgccgaggcttgggctcccacataagcactagtctatagatgcctcttaggactggtgcctggcacagccgcgggccaggaggctgccacacggaagcaagcagatgaactaatttcatttcaaggcagtttttaaagaagtcttggaaacagacggcggcacctttcctctaatccagcaaagtgattccctgcacaccagagacaagcagagtaacaggatcagtgggtctaagtgtccgagacttaacgaaaatagtatttcagctgcaataaagattgagtttgcaattgtgagttcttttgcttcctcctgctgctgctacagagcagggtctgctgtgcaccaccttggagaaggctctctgtgctgtagtgtggcagctgcctggtacccgggtggcttggaagaagtcagctcccgtcgtagtgagcacctctggaacctgtcctcagagagccacccttattcgccaagtctttttgacaactcgagctgtgccagctcacagcagggcgtgctttctctatcaatcaatcaatcaatcaatcaaatcaatcagtgagagcctggctgggctggtgtcattggtcagggaaatgcaagtcttctggtggttctgggtaaaagtggagacaatagatttgctgtgttgttgcttccatactgagaggagtgaggatcactttgccctcgaaggttttgagaaatggcacacggggctggtttccattgtcctccttgcgggatttacagacgtggattagtgctcgacaaatggagagcattttccaaggaagtaagtaagtaaagtaagtaagtaagtaagtaagttgaatctagtatttattgtgtatattccctacccaggagaatgtaaaaagaagagctttaaaaactcaaaagacaagcaagcgagagatcagccagggacctggctttacacaggtggtgaccttcaggctccatcccggtgtgcatttgagattgacggccatgtccccgcaggtttattaaagcaagaacagatgccaagctcagggataataaatctattttaataacgttaaaaaaaaaaa

SEQ ID NO: 311 - DNA, 3694 bp, Homo sapiens
agctcggtgcacggcgcgctgattggctggatccgccatgcggagcggctaggtggtgcacgggaaacgcgggcgtaggtgaccggcggctttctcagttttggtggagacgggcgcatgtgggcgctttgctcgctgctgcggtccgcggccggacgcaccatgtcgcagggacgcaccatatcgcaggcacccgcccgccgcgagcggccgcgcaaggacccgctgcggcacctgcgcacgcgagagaagcgcggaccgtcggggtgctccggcggcccaaacaccgtgtacctgcaggtggtggcagcgggtagccgggactcgggcgccgcgctctacgtcttctccgagttcaaccggtatctcttcaactgtggagaaggcgttcagagactcatgcaggagcacaagttaaaggttgctcgcctggacaacatattcctgacacgaatgcactggtctaatgttgggggcttaagtggaatgattcttactttaaaggaaaccgggcttccaaagtgtgtactttctggacctccacaactggaaaaatacctcgaagcaatcaaaatattttctggtccattgaaaggaatagaactggctgtgcggccccactctgccccagaatacgaggatgaaaccatgacagtttaccagatccccatacacagtgttagccagagaagaggggtcagggactcttccctggtcgtagctttcatctgtaagcttcacttaaagagaggaaacttcttggtgctcaaagcaaaggagatgggcctcccagttgggacagctgccatcgctcccatcattgctgctgtcaaggacgggaaaagcatcactcatgaaggaagagagattttggctgaagagctgtgtactcctccagatcctggtgctgcttttgtggtggtagaatgtccagatgaaagcttcattcaacccatctgtgagaatgccacctttcagaggtaccaaggaaaggcagatgcccccgtggccttggtggttcacatggccccagcatctgtgcttgtggacagcaggtaccagcagtggatggagaggtttgggcctgacacccagcacttggtcctgaatgagaactgtgcctcagttcacaaccttcgcagccacaagattcaaacccagctcaacctcatccacccggacatcttccccctgctcaccagtttccgctgtaagaaggagggccccaccctcagtgtgcccatggttcagggtgaatgcctcctcaagtaccagctccgtcccaggagggagtggcagagggatgccattattacttgcaatcctgaggaattcatagttgaggcgctgcagcttcccaacttccagcagagcgtgcaggagtacaggaggagtgcgcaggacggcccagccccagcagagaaaagaagtcagtacccagaaatcatcttccttggaacagggtctgccatcccgatgaagattcgaaatgtcagtgccacacttgtcaacataagccccgacacgtctctgctactggactgtggtgagggcacatttgggcagctgtgccgtcattacggagaccaggtggacagggtcctgggcaccctggctgctgtgtttgtgtcccacctgcacgcagatcaccacacgggcttgccaagtatcttgctgcagagagaacgcgccttggcatctttgggaaagccgcttcaccctttgctggtggttgcccccaaccagctcaaagcctggctccagcagtaccacaaccagtgccaggaggtcctgcaccacatcagtatgattcctgccaaatgccttcaggaaggggctgagatctccagtcctgcagtggaaagattgatcagttcgctgttgcgaacatgtgatttggaagagtttcagacctgtctggtgcggcactgcaagcatgcgtttggctgtgcgctggtgcacacctctggctggaaagtggtctattccggggacaccatgccctgcgaggctctggtccggatggggaaagatgccaccctcctgatacatgaagccaccctggaagatggtttggaagaggaagcagtggaaaagacacacagcacaacgtcccaagccatcagcgtggggatgcggatgaacgcggagttcattatgctgaaccacttcagccagcgctatgccaaggtccccctcttcagccccaacttcagcgagaaagtgggagttgcctttgaccacatgaaggtctgctttggagactttccaacaatgcccaagctgattcccccactgaaagccctgtttgctggcgacatcgaggagatggaggagcgcagggagaagcgggagctgcggcaggtgcgggcggccctcctgtccagggagctggcaggcggcctggaggatggggagcctcagcagaagcgggcccacacagaggagccacaggccaagaaggtcagagcccagtgaagatctgggagaccctgaactcagaaggctgtgtgtcttctgccccacgcacgcacccgtatctgccctccttgctggtagaagctgaagagcacggtcccccaggaggcagctcaggataggtggtatggagctgtgccgaggcttgggctcccacataagcactagtctatagatgcctcttaggactggtgcctggcacagccgcgggccaggaggctgccacacggaagcaagcagatgaactaatttcatttcaaggcagtttttaaagaagtcttggaaacagacggcggcacctttcctctaatccagcaaagtgattccctgcacaccagagacaagcagagtaacaggatcagtgggtctaagtgtccgagacttaacgaaaatagtatttcagctgcaataaagattgagtttgcaattgtgagttcttttgcttcctcctgctgctgctacagagcagggtctgctgtgcaccaccttggagaaggctctctgtgctgtagtgtggcagctgcctggtacccgggtggcttggaagaagtcagctcccgtcgtagtgagcacctctggaacctgtcctcagagagccacccttattcgccaagtctttttgacaactcgagctgtgccagctcacagcagggcgtgctttctctatcaatcaatcaatcaatcaatcaaatcaatcagtgagagcctggctgggctggtgtcattggtcagggaaatgcaagtcttctggtggttctgggtaaaagtggagacaatagatttgctgtgttgttgcttccatactgagaggagtgaggatcactttgccctcgaaggttttgagaaatggcacacggggctggtttccattgtcctccttgcgggatttacagacgtggattagtgctcgacaaatggagagcattttccaaggaagtaagtaagtaaagtaagtaagtaagtaagtaagttgaatctagtatttattgtgtatattccctacccaggagaatgtaaaaagaagagctttaaaaactcaaaagacaagcaagcgagagatcagccagggacctggctttacacaggtggtgaccttcaggctccatcccggtgtgcatttgagattgacggccatgtccccgcaggtttattaaagcaagaacagatgccaagctcagggataataaatctattttaataacgttaaaaaaaaaaa

SEQ ID NO: 312 - DNA, 1500 bp, Homo sapiens
aactgatatccctttcagtgagaaatcctcattagctacataagaggggactgggtgtttttttcaaaaagctggtattgggacatctacctctgtgatgtccctggtcagctatattgtctaggagttgaaacattttgtattaattttctatcatttactgggtgcctcttctgtgacagtgccactcaaaggtctattgatatattatcaggtgactgaattctatattctgaagtaggagatactgttattgctgttattacattttacacataagaaagctgaggctctgagaggtcaagatcacgcagctaacaaatgagccaagactcttgctttagagcttgtcctctattcttgcttttctttccaaaaaacactacaatttttgttttgttttgttttgttttgagacagggtctcgaggtgtcacccaggctggagtgcagtggcgcgatttcgactcaccgcaacctccgcctccgcgcttaagcgattctcctgcctcagcctcccaagtagctgggactacaagctcgggacaccacgtaaaaatgatcaagttctaacatgtatgcatacgaattacaatggaaataaaattagcaaagcgcttatgctaatgctcaatacaattgatttcctcacatttaatcctcacaaccactacaaccacctctaactcaagctctgagggactgacgtgcccggaggacacagctcttatctggtgagaacaggagcgttttagcgaaactccaaactcctaggtcccgccttccccaggaaggcttttcctggcactgtgcttccggaagtcccgccccaggagaaaaacagcttccggaaaaaattgcggccggcaaaccggaacagaactaggggcggggccgcttgagacgctctagtattcctctactctatggccactgtcaattgacaagtcccgagcggtaaagctcctttctattggatgagcagcctcgcgtaggcgggaagctcggtgcacggcgcgctgattggctggatccgccatgcggagcggctaggtggtgcacgggaaacgcgggcgtaggtgaccggcggctttctcagttttggtggagacgggcgcatgtgggcgctttgctcgctgctgcggtccgcggccggacgcaccatgtcgcagggacgcaccatatcgcaggcacccgcccgccgcgagcggccgcgcaaggacccgctgcggcacctgcgcacgcgagagaagcgcggaccgtcggggtgctccggcggcccaaacaccgtgtacctgcaggtggtggcagcgggtagccgggactcgggcgccgcgctctacgtcttctccgagttcaaccggtcagtcaacgagccacgccccgtcccgctgggccctcagtgcggcgcagcctctgagcatcggggcacctcccagggcttcggcttccctgcttcacacatgtggttcactgttgcgggggttcgtggagttatggt

SEQ ID NO: 313 - DNA, 1362 bp, Homo sapiens
tctcctgcctcagcctcccaagtagctgggactacaagctcgggacaccacgtaaaaatgatcaagttctaacatgtatgcatacgaattacaatggaaataaaattagcaaagcgcttatgctaatgctcaatacaattgatttcctcacatttaatcctcacaaccactacaaccacctctaactcaagctctgagggactgacgtgcccggaggacacagctcttatctggtgagaacaggagcgttttagcgaaactccaaactcctaggtcccgccttccccaggaaggcttttcctggcactgtgcttccggaagtcccgccccaggagaaaaacagcttccggaaaaaattgcggccggcaaaccggaacagaactaggggcggggccgcttgagacgctctagtattcctctactctatggccactgtcaattgacaagtcccgagcggtaaagctcctttctattggatgagcagcctcgcgtaggcgggaagctcggtgcacggcgcgctgattggctggatccgccatgcggagcggctaggtggtgcacgggaaacgcgggcgtaggtgaccggcggctttctcagttttggtggagacgggcgcatgtgggcgctttgctcgctgctgcggtccgcggccggacgcaccatgtcgcagggacgcaccatatcgcaggcacccgcccgccgcgagcggccgcgcaaggacccgctgcggcacctgcgcacgcgagagaagcgcggaccgtcggggtgctccggcggcccaaacaccgtgtacctgcaggtggtggcagcgggtagccgggactcgggcgccgcgctctacgtcttctccgagttcaaccggtcagtcaacgagccacgccccgtcccgctgggccctcagtgcggcgcagcctctgagcatcggggcacctcccagggcttcggcttccctgcttcacacatgtggttcactgttgcgggggttcgtggagttatggtgggtgggaaatccgagattctttgcatccatgtgatttctgcggatctgtgaagaacttcaggcctgggtctgagcgtccttttcccaacccttgggccccggcctggctgtcagcactttcggagctccaccctcttccgtgcaccccaaggccagtgtgtcgttgttagcgtgtggggtggacagatctggtgtgtagccggtggtggagaaaggactcattttgtcctagcacccacacacacaggcccccactcctctccacctctgctaaggagggctcaaaacccaccagcataaatgtggctcggtagtccaacgtggacttttaatttttttttcttttttttttttccagagt

SEQ ID NO: 314 - DNA, 1051 bp, Homo sapiens
cggcttccctgcttcacacatgtggttcactgttgcgggggttcgtggagttatggtgggtgggaaatccgagattctttgcatccatgtgatttctgcggatctgtgaagaacttcaggcctgggtctgagcgtccttttcccaacccttgggccccggcctggctgtcagcactttcggagctccaccctcttccgtgcaccccaaggccagtgtgtcgttgttagcgtgtggggtggacagatctggtgtgtagccggtggtggagaaaggactcattttgtcctagcacccacacacacaggcccccactcctctccacctctgctaaggagggctcaaaacccaccagcataaatgtggctcggtagtccaacgtggacttttaatttttttttcttttttttttttccagagtctacaataaaacatctaattggtgtcagagagtttacagaataaaaccttctgaatgtcttgtgtaatgtttgtcttgtaggtatctcttcaactgtggagaaggcgttcagagactcatgcaggagcacaagtgagtcagtctcttgctttcggagggggagttgattacggggcttgaaagccgaaatgagaggccagttgttttttatagcaaaagtggtccttgttctgttcatgttatcctgtttaaatgttttttcattcttaggttaaaggttgctcgcctggacaacatattcctgacacgaatgcactggtctaatgttgggggcttaagtggtgagtatattctttgcagtgtcagaggctggtgggaagtctctgggattttaaccggctttaccatttttccaagtctggggtgggcagctacttttttttttttttttttttttgtcagtggcgtgatcttggctcactgcaacctttgccttctgggctcaggtgatcccctcacctcagcctcccaaatagctgggaccacacgtgtgccccatcacacctggctaattttttttgtatgttttgtagcgacggggttttgctatgttgcccaggctggtctcaaac

SEQ ID NO: 315 - DNA, 1071 bp, Homo sapiens
cctcttccgtgcaccccaaggccagtgtgtcgttgttagcgtgtggggtggacagatctggtgtgtagccggtggtggagaaaggactcattttgtcctagcacccacacacacaggcccccactcctctccacctctgctaaggagggctcaaaacccaccagcataaatgtggctcggtagtccaacgtggacttttaatttttttttcttttttttttttccagagtctacaataaaacatctaattggtgtcagagagtttacagaataaaaccttctgaatgtcttgtgtaatgtttgtcttgtaggtatctcttcaactgtggagaaggcgttcagagactcatgcaggagcacaagtgagtcagtctcttgctttcggagggggagttgattacggggcttgaaagccgaaatgagaggccagttgttttttatagcaaaagtggtccttgttctgttcatgttatcctgtttaaatgttttttcattcttaggttaaaggttgctcgcctggacaacatattcctgacacgaatgcactggtctaatgttgggggcttaagtggtgagtatattctttgcagtgtcagaggctggtgggaagtctctgggattttaaccggctttaccatttttccaagtctggggtgggcagctacttttttttttttttttttttttgtcagtggcgtgatcttggctcactgcaacctttgccttctgggctcaggtgatcccctcacctcagcctcccaaatagctgggaccacacgtgtgccccatcacacctggctaattttttttgtatgttttgtagcgacggggttttgctatgttgcccaggctggtctcaaacttctgcgatcctcctgtctcggcctcccagagtgctgggattacaggcatgagccaccgcacctggcctggaattctttttataccagcccagtcagcagcagcacagagcattaaaagctgtgactcaggagaacagattttaatatggataccacctcttaagtgttaccatccacttagtttcttgcgttgcggggacagagattt

SEQ ID NO: 316 - DNA, 1065 bp, Homo sapiens
gtgattacagttaatatgtttaccgcagacgccattggcacattggcagccacacacatacccactgtccagattaccctgtcatttatgtctatcaaccggaaggtcaggattgtgttgcagccaaattgtgtgggcttggtggcatggaccggaaggagtgaagtgttagaccagtctcccttctcagggctgagactagggtgaggcacttagggtgccagcccttcacttgcatgattccttacattttgcacactgggtgccttgctgcttcaccctagtgacagctcagcccattctagaggcatttaaagaatatttggtgtctgttacacctctagctggcatcacttctgctctgtacatcttccctggttgtacttccaaagctggaaggtggagatgtagataaatagttggattagtacggggtgctcctcctgttagtgacgacaggtcaaattgatgagagatctgattttatgcatcctttttaggaatgattcttactttaaaggaaaccgggcttccaaagtgtgtactttctggacctccacaactggtgagtctttcctgacacatctttcaaaagcaatctttccttttgtaatatcagtaacaagaattttcctttttgcaaatcagtcttctgccctccagagatacctggtcgttgaaacgcttcccctttcaagttaaaaagacttgagttctgattaactatgtgaccttgatcaagttactttacctttctgagctttagtttattcatctataagatgactatcacgtttcatagagttgttaaagattaaatgacgtagcagcacatataaagcactaaatcactttattagatatatgtttggcaccaagtaggcacacaagaaagggcagcttttgtttttattcaataaatttctgacatcttcttacctttcagtccagcttattacactcttgagaaggcgtgtgtgtgttgttgaatataacagttcattttccagtccttaagaagaaagtcaccaagacctgttaagtctttccccaaaataacgtttg

SEQ ID NO: 317 - DNA, 1058 bp, Homo sapiens
cgctgaactgcagctgcatgggctgactcttatgtccctctaactccctggccacttcaggactttcgcccttccgcgggttccctctgcctcttctaattgctgcctatattgttactgaaccttcagggctcagctagagggtcatttactccagaactgcctcttcttctctagacaagttggatcccagccttctgtatttttcattttccttgcagagcacttagcataatgccactaagctgtttctgttatcgtgtttccttttgtctcctccactggcctgattagagcaaggcctccatctctttttcctgctatatccttggcatctgatataatggatactcagtaaatatttgtaataaatgatgttcaaaatatttactaagctttgttttatgttgatacctattggtaaccttttaaatacttgaatagttgctgtgttctacatttgttcaaccataactgctcatttctttgtttttcattaggaaaaatacctcgaagcaatcaaaatattttctggtccattgaaaggaatagaactgggtacgtctttgtctgtgactcatcctctgctatttctaacttatatatgccctgacctctcaaattagaatccattaaaaacatcaacatcaaacctcaaaatcaaatgcttcatcaccacgagatttttttttttttttttttttttggatagagtcttgctttcttaccaggctggagtgcagtggcatgatctcggctcactgcaacctccacctcctgggttcaagccattctcccacctcagcctcctgagtagctaggactacaggcgcatgccatcacgctcagctaattttttgtatttttagtagagacggggtttcaccatgttggccaggatagtctcgatctcttgaccttgtgatctgcccgcctcagcctcccaaaatgagctaccatgtggctggagatgggatttctaaatagtgacattttctgtgttcccacctcatgctgtaaaaataggggccaggtcggcaggagtgattgaacagctg

SEQ ID NO: 318 - DNA, 1069 bp, Homo sapiens
ctccagctgcgcaggggggcttacagcctcttgatgggaagaggcctcactgaggatgctagtagggctcttgtcctggcactggtgtgtatctgtggcttgttaatactcctcttttatagaaacactaatactttgtttcaaaatatacatcagctcttctggtttgcgatgataggttccctggcttcactattctgtttgttaacttgggtctctgaaagttgagtactagtttcttgtttttcaatttttaacggatagtcaccaaagattataatgtcttttcatctggctgtagtaaatataaatggctgaccaaaatacacttttatttatttcctaaaaatggtaatctccttagaaagtctggttttcgtgtcagattcccaccataattctgaggcaattcagttgctcgtggttggtgatcctgaagttactcttcccacacatcttcactaatgcaatcactttgctgttgtgtggttttcttgtagctgtgcggccccactctgccccagaatacgaggatgaaaccatgacagtttaccagatccccatacacagtgagtatgaaagccaggtttcccaggaggagggtgtacgtcctgagtaaagaaaacatggatgaaaatagaaactgaacacttgctgtgggcaccctgttttgtgttctgagcatgattagaaaatttagttgaggaatgaagatatggctcctgccctggcttataaacttacggatgtctgacttatgcctaatgatagtgattatgctttggaatattagataatcaagcactgttggtaaatagattgcattcaagtttgcacattcattgcttggaggttttttcccacaggcgtaataccctcttttgatcagacgatcatgaagaggtttgcacagatagatttttttaaataaataatgattacagcaacctaaaagaagtgttgttgggggttagaagctcctgcaaattccgaagtatcagggccagatgatgtggtcttagcttaggaaaagagttagtcttgtccttgaacttggctaaagacattc

SEQ ID NO: 319 - DNA, 1120 bp, Homo sapiens
gatcgatgttaacatgctcagttttgccgatcactgttttttcagtgtccagcggccctcagtgagtgaacttacgttcattctcgttgcagctgtgctttagcttcttagagcagcgaatttttttcccttgatcttgagccttaactaaatgtaaaatgaggctccttcttgagataggtaccctttgggtctatgtgttttagcgggagtgatgataataaataagcatgtctacaacccacatgctgtttagataacacgttgttgagttggtactgtggccgaggctgtgagctaagcagaaacataaacattaataggacataggtgcagcccagaaaccaggtaggaagttaactaactagttatttcctactgtatagtaaaaggtgtgctgatttaattggcgttctggcattcccatgtatgaacgtctgggccttggctgtcagctcaccttgtgcagtgtgtaatttggtggtatctgtactgaccaggtgaacagaggaggggaaagcaccaaccatggcagagtccagaaaggcctctcagcaggctcagtccagagcgatcttcagactccgagtcgaatgaaaatgagccacaccttccacatggtaatagtataaacaaaacagagcagcagaaaggcttgcgttttcttaattctctgccttgtaatgcttgtagagagtcattattgtaagaaagccaggtgtgtaaacagatccttcttcctgggcttactataacttggcccgttgggggaatgagaagggttgttgtaaaggtggcagcctgcaactttaataatgaccagtccacagttttggccacccagggtctgggtaggcccaaaactgtgttctgttttcccagaggagaacagggcctgacaaacggattcattttgtatttttcattaatgtaacatttatgcaaattttccattaatgtggaaactataactgctaagccaatgagacagtcaaatcagtgagaggctctgcacgtcttccagaatgacagcccactgggaaacggagttaaaagtccaagatgagatgtagctcaggagtcaggccgcttcgggagtttgttgtccttaacagaaggt

SEQ ID NO: 320 - DNA, 1059 bp, Homo sapiens
acagaaggtcagcgttggcaaagctcggcagctcctctttctgtcctgaggtcttgtctagtgactgagaacaggctgacccctatgtgctgtccttgtttggatggcaccgggtaaagactgacaccagcattttctctgcaggcctttgaacttttgtgttatttcatatattatatgtgttataaagcacattacaatatatttttctctgtcttctccagtcctaggtgaaatgtgtcatttaaaaaaaatttcacttgccattctaaagtttttctggtgagagttttgtgtttttcatttacgcaaacacatctccacataagtagggaaaaaaagtcttcttgagtatattagtgtcttcagcctttgtattgggacagtagcgtccattaatttttatgtgaagtgaaattaggtatcgggtcataatcagtctgtgatgtcttcacagctttcacatttaccttgtgataatcaagtgtgtttttcctcaggtgttagccagagaagaggggtcagggactcttccctggtcgtagctttcatctgtaaggtaaggaagactttccggagggctgtacatgactggggtcttggtcagcgacctctggtttgcactttttcattaatttgagggtaggcactcctgttacctgagacaagaagagatagcagatcttcagaaaagctgatggaaggccgggtgcagtggctcacgcctgtaatcccagcactttgggagtccaaggcaggtggatcacgaggtcaggagtttgagaacagcctgaccaacgtggtgaaaccctgtctgtactaaaaatacaaaaattagctgggtgtggtggcgcatgcctgtaatcccagctacttgagaggccaaggcaagagaatcgcttgaacacaggaggcggaggttgcagtgagttgagattgcaccattgcactccagcctgggtgacagagcaagactctctcaaagaaaaaaaaaattcgatagaaatgacactggcaatgagcctgcaacaagtattactactgacctttcataattgt

SEQ ID NO: 321 - DNA, 1059 bp, Homo sapiens
atttgacaataaatgacttcttcagaatatggtataccttctgaaagcaataaacgcattttaatgaattgtaaggaaacaacatcattttattttttatttttttttttgagacagactttcgcttttgttgcctaggctggagtgcaatggcgcgatctcggctcactgcaacatccgcctctgggttcaagcgattctcctgcctcagcttcctgagttgctgggattacaggcacgtgccaccacgcctggccaattttgtatttttagtagagacggggtttctccacgttggtcaggctggtctcaaactcctgacctcaggtgatctgcccgcctcagcctccgaaagtactggaattacaggcgtgagccaccgtgcctggccaacattattatttttttttaatctagaaaaatacacttctaagaaaattgattaaaaccaaccttcttcattagcccctaagatcacatctatgttctctttgttgcagcttcacttaaagagaggaaacttcttggtgctcaaagcaaaggagatgggcctcccagtgtgagtgtggggggtaaggcttctggggactcactgggtacacctgtccacttaaggaaatcacatttcacagaggccttgcctcttcatttcagtgggacagctgccatcgctcccatcattgctgctgtcaaggacgggaaaagcatcactcatgaaggaagagaggtgagatgcctggttttcttgattcagcagttacaggtagggtctgaaatgctgggcagagtctgtcttcttcaggccctacagacaccacttttgaaggacgtggaacagtttggacatcactcagctaagtgataaaatggcctcttttatctgtgtttgtcccgcatgtcaacacggctgcattcgagcatttttgtagattgtccatttaggatctagtcaccgtcctccttaaagggtgcatgctttccttggtacttgagctcaggacagtgtctaacaacagaccccatatggatgggcctggggtttatggtccagaggaatgc

SEQ ID NO: 322 - DNA, 1073 bp, Homo sapiens
gcgatctcggctcactgcaacatccgcctctgggttcaagcgattctcctgcctcagcttcctgagttgctgggattacaggcacgtgccaccacgcctggccaattttgtatttttagtagagacggggtttctccacgttggtcaggctggtctcaaactcctgacctcaggtgatctgcccgcctcagcctccgaaagtactggaattacaggcgtgagccaccgtgcctggccaacattattatttttttttaatctagaaaaatacacttctaagaaaattgattaaaaccaaccttcttcattagcccctaagatcacatctatgttctctttgttgcagcttcacttaaagagaggaaacttcttggtgctcaaagcaaaggagatgggcctcccagtgtgagtgtggggggtaaggcttctggggactcactgggtacacctgtccacttaaggaaatcacatttcacagaggccttgcctcttcatttcagtgggacagctgccatcgctcccatcattgctgctgtcaaggacgggaaaagcatcactcatgaaggaagagaggtgagatgcctggttttcttgattcagcagttacaggtagggtctgaaatgctgggcagagtctgtcttcttcaggccctacagacaccacttttgaaggacgtggaacagtttggacatcactcagctaagtgataaaatggcctcttttatctgtgtttgtcccgcatgtcaacacggctgcattcgagcatttttgtagattgtccatttaggatctagtcaccgtcctccttaaagggtgcatgctttccttggtacttgagctcaggacagtgtctaacaacagaccccatatggatgggcctggggtttatggtccagaggaatgccacagtattctatgtcaagatatttcctctgacttctgaggacattaggaccagtggccacagactgaagaaaaccttaatgccaagcctcctttcctggccagtgtaggcctgaagtgcctcaacctgacagttacctgtttaggtatccacaaagagaccagaagg

SEQ ID NO: 323 - DNA, 1113 bp, Homo sapiens
atctgtgtttgtcccgcatgtcaacacggctgcattcgagcatttttgtagattgtccatttaggatctagtcaccgtcctccttaaagggtgcatgctttccttggtacttgagctcaggacagtgtctaacaacagaccccatatggatgggcctggggtttatggtccagaggaatgccacagtattctatgtcaagatatttcctctgacttctgaggacattaggaccagtggccacagactgaagaaaaccttaatgccaagcctcctttcctggccagtgtaggcctgaagtgcctcaacctgacagttacctgtttaggtatccacaaagagaccagaagggtgttgatggtgatgtgtaaagttggttttgtgctttgtttacctctcagctcactggataggatatgtcatgttagcagttgccttgaaggcagttcagtttggtggctgagctgtgacccccagtgggcgggcttatttggttttgcagattttggctgaagagctgtgtactcctccagatcctggtgctgcttttgtggtggtagaatgtccagatgaaagcttcattcaacccatctgtgagaatgccacctttcagaggtaatgaggggtctctagggtgggagaagtgagagctgaaacccagcccagcatcgacatgggcatcttgtggcaagagctgtgtttctgggaagaccactatctgggtttacagttcagaggccggcactcctgccttaagtcactgttggtagttggtgggctccggtgtacacagcctcaaagtgaaattagaaaagattgaaaactagaaacaactgaggactagaaattcaactagaactcttacagctcttataccagaagaaattctagaacttttttgaattctaactaatgccccagattatcatttggattattttgaactgaattaattttcttccattacctgcattgaaacaaatgaggtgggtcagagtgtgtgagactgtcgtggtcaagagtccgtgttatgggatggactcacagctggggaatgtcttttgggctaactgccactctgttgttgtcctctatcgaagttaaccagttttgcg

SEQ ID NO: 324 - DNA, 1096 bp, Homo sapiens
ttagtaagtggtctgttgtccaggtggtgaaatttcagatgattttcatttctcgtgcctgtgtctcaggtcctctggaaggcagacaccagggtggcattggaggtgcaggaggtttattcgaggaaatttgactgtgagagaggaaggagagagggagcaggaggaggcagggagagcctgggtctggctttgcaggttggacccgtatgagtggagagggtaggaaggaagtgcagtgctgagaaaggatcagccaggcctactggaaagcccagagcagagcttgccagatacaggaatcccacgtccattggaaatggcccagcaccggggtctgccgtgagcagcctgctgtgagagcatggcctgggcgtggaggctgtcagctcactgcagtgctgcagagggccgcacgatacccctccctggctgcgtggtccctgtcttggtgtgtcctgagtctgcatcactttgtaaagccccactcttctgcccaggtaccaaggaaaggcagatgcccccgtggccttggtggttcacatggccccagcatctgtgcttgtggacagcaggtaccagcagtggatggagaggtatggagcccagcccagcggcacttggggtaactcttctgggcagtggtggattcccctttcctcccctcgtgctctttccagcgctacctacccttctgcacctgcctaaactttctgtgggattcctgccttcccagaattctaggcttcccagatctgtgctacactcgtgaagaaaatgcaccgctaggtggcgcagtgtccacacgattccatttattttacaccctccacactcttcagggtgtctgaacaaatactgccgtttggttgaggattccataagtgaattccaaagaagagattgcagctataaaatgatagcttccatttactgaatgcccactttgtgggaggcagtgtgtgaaatacccttcatttcacttcatttcctctagggtcgtcgccagcagccctgggaggtagatgtttagtcactggaaggcatctttttcctcggggcatcgctggccagggccaggtggaggagtatgagt

SEQ ID NO: 325 - DNA, 1139 bp, Homo sapiens
agggtcgtcgccagcagccctgggaggtagatgtttagtcactggaaggcatctttttcctcggggcatcgctggccagggccaggtggaggagtatgagttgagctcgggtgcggggtgaccttgggctgctttttggcccctgcccgtatctccccacatggcccgtttacctgcccctcactccatggcctgctctcctgctgtctctttcattcctcagggtttgggtcccctatttgtatgccctggacatcttctttttcttgtttttcctctcactcttcccagcacacctgaaaggcagctgagctagggaacaccgggctttgagacagcaggagtgggaccatgtttggccatgtagtaacactgcttggggcaagtcactgaactgtttgaacacctcatcctcattaccactcctgagctcagcaccactcctcagggggagctgcctcctaacagacgctgcaaatgccgggtctgtttcttcacaggtttgggcctgacacccagcacttggtcctgaatgagaactgtgcctcagttcacaaccttcgcagccacaagattcaaacccagctcaacctcatccacccggacatcttccccctgctcaccagtttccgctgtaaggtagtgtctcagaccggccccttgtcggcccagctctcgtcccctctctttctctccatgaatgtgttttgtctctttcagaaggagggccccaccctcagtgtgcccatggttcagggtgaatgcctcctcaagtaccagctccgtcccaggagggagtggcagaggtctgtgccatcttgaactaatggaatcgtctcagtcgagttgggaaacatttctgtaaatagccacatagtaaatgttccaggaggctctccagaccatatggtctctgttgtaactattcaactccgctttgagcacaaaagaaacacggacaataagctaatgaatgggcttggctgtgtgccagcgtgaatttatttagaaaagcagcctactccaggctgggttgaggtgggcggattggggccagtagttctccttttccaaaattgccttgcatgggaatagcagtgatagagctcgtgtgtttcacagtatagaaaataggaaat

SEQ ID NO: 326 - DNA, 1086 bp, Homo sapiens
cagggtttgggtcccctatttgtatgccctggacatcttctttttcttgtttttcctctcactcttcccagcacacctgaaaggcagctgagctagggaacaccgggctttgagacagcaggagtgggaccatgtttggccatgtagtaacactgcttggggcaagtcactgaactgtttgaacacctcatcctcattaccactcctgagctcagcaccactcctcagggggagctgcctcctaacagacgctgcaaatgccgggtctgtttcttcacaggtttgggcctgacacccagcacttggtcctgaatgagaactgtgcctcagttcacaaccttcgcagccacaagattcaaacccagctcaacctcatccacccggacatcttccccctgctcaccagtttccgctgtaaggtagtgtctcagaccggccccttgtcggcccagctctcgtcccctctctttctctccatgaatgtgttttgtctctttcagaaggagggccccaccctcagtgtgcccatggttcagggtgaatgcctcctcaagtaccagctccgtcccaggagggagtggcagaggtctgtgccatcttgaactaatggaatcgtctcagtcgagttgggaaacatttctgtaaatagccacatagtaaatgttccaggaggctctccagaccatatggtctctgttgtaactattcaactccgctttgagcacaaaagaaacacggacaataagctaatgaatgggcttggctgtgtgccagcgtgaatttatttagaaaagcagcctactccaggctgggttgaggtgggcggattggggccagtagttctccttttccaaaattgccttgcatgggaatagcagtgatagagctcgtgtgtttcacagtatagaaaataggaaatgtgtgatgaacaaagtcacccataatcctgttgcccagagataatgattgataacattttgtgtttcttgatttgtgtatgtgggtttatattgtcagtcttttcctgtatcactaaacagtcttaagtaacaagatttttattggtattccaaatagggatgttta

SEQ ID NO: 327 - DNA, 1119 bp, Homo sapiens
gaaagtgggatctcaggcctcactgcagagctgccgaactggcttctgcgttttgccaaggttcctgggtgtgaacatgagtttcagagtcactcctctagggcccctgcttctcagctcggaccattgacccctcagaggacatttggcaacatctggaaacgttcttggttgtcacagcctaggaggtgggtagtggtgctgctagtgggtagaggtcaggggtactgcaccaggacagcagcactggccacagaaaaaaactgtcttgccctgagcatcagtagttccccgttgactggccctgaggcagagcgatgcagcatccaaaaggcggtggagcagacctgccccagatcctagtcacttaaccttcagtgttgatctgaaggaacttcctgcagattgtccccctgaatttattctggacatccccaatggggtctgctgaggccatataccctgtccgtcacctgagatgcttctctctcttcctgcagggatgccattattacttgcaatcctgaggaattcatagttgaggcgctgcagcttcccaacttccagcagagcgtgcaggagtacaggaggagtgcgcaggacggcccagccccagcaggtgagtgggagcccacagagcagcctttctttcctgggctctgcccctgctgctgttttcctagcattaagtggagtgctggtggggcgcattctaacctggcttttcagtctaatccagggcttctctactcagctctacattagaattatagtcattggaggagggggctttggggagtttaagaatcccaattcctggctgggcgcggtggctcacacctgtaatcccagcacttcgggaggccgaggcaggtggatcgcgaggtcgggagatcgagaccatcctggctaacatgatgaaaccccgtctctactaaaaatacaaaaattagctgggcgtggcggcgggcgcctgtagtcccagctactcgggagactgaggcaggagaatggcgagaacccgggaggcggagcttgcagtgagccaaggtcgtgccactgcgctccagcctggacgacagagtgagactccgtctcaaaaaaaaaaatcccaattcc

SEQ ID NO: 328 - DNA, 1097 bp, Homo sapiens
tgttttgttattataaaagaatatgtgagactgggtaatttatcaagaaaagaggtgtatttagttcacggttctgcgggctgagaattgaaggtcacggccctagcttccagtgaaggcttccatgctgcatcataacgtggcagaggagcgcaagtaggaagtggacgcttgtgaagacgggataacctgagctgcactctggctttataacaacccccctctcctgggaacaaatccattcccttgagaagtaatgcagtctcctgagagccagtacttactactgcagctccaagccactcaggagggtccgtccctgtagcccaaacgccttccactaggccccgcctcccaaaaccgccatactagggagcacgtttccacatgaggtctggggacaaaccaatgacactcaaaccattgcaccttctcatggctgcatgctggctcacttttgacccaaaggaatggattgtttcacatggattttttcacagagaaaagaagtcagtacccagaaatcatcttccttggaacagggtctgccatcccgatgaagattcgaaatgtcagtgccacacttgtcaacataaggtatgctgctttcccaggaagcatccttccatcaagggcacgtttactttttaaacaaaagtcctgctgtactcaccagtcgatttgaaatgcggtatcaagccctgtcacttgtcatgtcgactggagtgtccaggagaggagcgtggccttactgcattttatagcctcagtagcaaactttaccctgggaatcaccaaaattcatcccatgatgtcttttaataaacagctgattttactgtgggcagtacacctagctaagaaattagctcctttaatttttacattaatcctatgaagtggtgaataactacccattttgttgatgagtgacctgatattcagagaggtgacttgctatggttcctacagctggtaagtggggcatctgaagtttgagcggggacttggggtcttgattgctacatggtattgtcccccagccatttgttggtagtatgttaaaaagctttagggttttgcacatttgtgttcag

SEQ ID NO: 329 - DNA, 1139 bp, Homo sapiens
tgaatgaagcacctgcagcccgccctgcaccaggtgtctttgaggacatgagctgaggaaaccccgaccacttgcaaagggggaaaagtccgatggcagctggacctagaaagagtctcatatggcccagtgcctgtcctggtattttcaacagaggctgtggccacagtcaatctgcatggtcagattcattgttaggactaaatgctttaagcctcctataaactttttttttttttttttgatgcccagcctttgtgtaagtctacttgaaagggtttcagggttccatggatacttctttgctataaagaggatgacacatgtaaaatcacctttatggttaaattaattggcttttatattagctcctcaaagcaaagcaggagagacagaaatttctgcagttgcttcttggtcctgtccaaagcagacatcagcctctgaaccatcagcagtcttcctagtggcagtgactctcttcctcttctcttctgcagccccgacacgtctctgctactggactgtggtgagggcacatttgggcagctgtgccgtcattacggagaccaggtggacagggtcctgggcaccctggctgctgtgtttgtgtcccacctgcacgcagatcaccacacggtgagtgttgggctggaccacaaagctggagcctggaggaggcactgccacgttgagttggccctttggctgcgtcttttcctccgcttccaaacttgcccagagcttttgttactcatctctggctaggaaatggttttttgcaaaactcaacatagtccttctgcgccacaagaatgtcttctcttcctgttcagttcctttcctgcagcaggacaggtttgagtttacccagccttccttgagtcttgaatctcacacggcctgctcagcggaagctttgaccggatgcaggaggtgtggctatgagaccctcaccttggtctcctggggtgccgggccctgggccgttgccctcttcccagcacgggtcgtgtcgctttctgcctgtgacatttcagggccatggcgcagggggctcggcctgtgccacccccactgcggctgtgttagaggctggtgggtgacgtcgggctggcaactcctgcaagagagagggc

SEQ ID NO: 330 - DNA, 1039 bp, Homo sapiens
gctgcgtcttttcctccgcttccaaacttgcccagagcttttgttactcatctctggctaggaaatggttttttgcaaaactcaacatagtccttctgcgccacaagaatgtcttctcttcctgttcagttcctttcctgcagcaggacaggtttgagtttacccagccttccttgagtcttgaatctcacacggcctgctcagcggaagctttgaccggatgcaggaggtgtggctatgagaccctcaccttggtctcctggggtgccgggccctgggccgttgccctcttcccagcacgggtcgtgtcgctttctgcctgtgacatttcagggccatggcgcagggggctcggcctgtgccacccccactgcggctgtgttagaggctggtgggtgacgtcgggctggcaactcctgcaagagagagggctgcagaccctaacccggaggggatggccctggggcctggctgacgcatgtctcctgtttccttgccagggcttgccaagtatcttgctgcagagagaacgcgccttggtaagtgtggcacttgatgggcgttctgagtttcagcggtttacacatcatccgccatgcctcttggcactccagtttttattgagatgttctgtcgtcgagtcggcacttgcattttttgttccaggcatctttgggaaagccgcttcaccctttgctggtggttgcccccaaccagctcaaagcctggctccagcagtaccacaaccagtgccaggaggtcctgcaccacatcaggtgagcatccagggcagcctggcccgctgggctgttgcttgctgccgtctccttcagaagctcaaggtggacactggggtagttaccaatatcccccagcagccttgcccttgacatggtcccagatggcagaagcaggggagaagtgcattggctgaaggacagaaaccattagatagttcccatgtaatgcttattttcttagaagcatttcttcccagtcctcatttgagttctgagctgctttctaaacttcgagcagc

SEQ ID NO: 331 - DNA, 1110 bp, Homo sapiens
gccttccttgagtcttgaatctcacacggcctgctcagcggaagctttgaccggatgcaggaggtgtggctatgagaccctcaccttggtctcctggggtgccgggccctgggccgttgccctcttcccagcacgggtcgtgtcgctttctgcctgtgacatttcagggccatggcgcagggggctcggcctgtgccacccccactgcggctgtgttagaggctggtgggtgacgtcgggctggcaactcctgcaagagagagggctgcagaccctaacccggaggggatggccctggggcctggctgacgcatgtctcctgtttccttgccagggcttgccaagtatcttgctgcagagagaacgcgccttggtaagtgtggcacttgatgggcgttctgagtttcagcggtttacacatcatccgccatgcctcttggcactccagtttttattgagatgttctgtcgtcgagtcggcacttgcattttttgttccaggcatctttgggaaagccgcttcaccctttgctggtggttgcccccaaccagctcaaagcctggctccagcagtaccacaaccagtgccaggaggtcctgcaccacatcaggtgagcatccagggcagcctggcccgctgggctgttgcttgctgccgtctccttcagaagctcaaggtggacactggggtagttaccaatatcccccagcagccttgcccttgacatggtcccagatggcagaagcaggggagaagtgcattggctgaaggacagaaaccattagatagttcccatgtaatgcttattttcttagaagcatttcttcccagtcctcatttgagttctgagctgctttctaaacttcgagcagcttttcttgatgagacagttccagagccaagcacccaaatagtggctagcacagagaatgtccatagcaggtgtgtggctagctggcaggtggcaccatcctcaccccaaggggaaggagtcccctctgctggagccatccgtggcccgtgctgcctgagccggaggcagcattcacctgctgggtttctcccagtggcctagaggctttggtttggctctttatatttgactgctgt

SEQ ID NO: 332 - DNA, 1100 bp, Homo sapiens
gagaagtgcattggctgaaggacagaaaccattagatagttcccatgtaatgcttattttcttagaagcatttcttcccagtcctcatttgagttctgagctgctttctaaacttcgagcagcttttcttgatgagacagttccagagccaagcacccaaatagtggctagcacagagaatgtccatagcaggtgtgtggctagctggcaggtggcaccatcctcaccccaaggggaaggagtcccctctgctggagccatccgtggcccgtgctgcctgagccggaggcagcattcacctgctgggtttctcccagtggcctagaggctttggtttggctctttatatttgactgctgtttcctcatcatagtgactatgatttaactcatgttttctcctaagaatgattttggggttctccagccaaagacttaaactttggttccagatgtccaagaaacgtttattatcattttaaatgttttgtctttttacagtatgattcctgccaaatgccttcaggaaggggctgagatctccagtcctgcagtggaaagattgatcagttcgctgttgcgaacatgtgatttggaagaggtaaggggcacagccgcaggcatcatgggggcgaggtggggagcagagctgcagagccctccagccccaccctttcagtttcagacctgtctggtgcggcactgcaagcatgcgtttggctgtgcgctggtgcacacctctggctggaaagtggtctattccggggacaccatgccctgcgaggctctggtccggatgggtgagtagaggaagaagcaagccaccctgaggttgctctggggtttgtgtagctggaggtgaatgcaggtgggcttgcagggaaacgtcagcagaggcaggagactcaggtccccaccctcagagtctctggttgtcatcctagtaggcagacccagggccaggggagctgagtgttgagaccaggaaacagcacgtgactgaggcctgtgtgccgctctcgcagagaactctgccctgatccttgtgctgcttctccagggaaagatgccaccctcctgatacatgaagccaccctggaa

SEQ ID NO: 333 - DNA, 1121 bp, Homo sapiens
aatgtccatagcaggtgtgtggctagctggcaggtggcaccatcctcaccccaaggggaaggagtcccctctgctggagccatccgtggcccgtgctgcctgagccggaggcagcattcacctgctgggtttctcccagtggcctagaggctttggtttggctctttatatttgactgctgtttcctcatcatagtgactatgatttaactcatgttttctcctaagaatgattttggggttctccagccaaagacttaaactttggttccagatgtccaagaaacgtttattatcattttaaatgttttgtctttttacagtatgattcctgccaaatgccttcaggaaggggctgagatctccagtcctgcagtggaaagattgatcagttcgctgttgcgaacatgtgatttggaagaggtaaggggcacagccgcaggcatcatgggggcgaggtggggagcagagctgcagagccctccagccccaccctttcagtttcagacctgtctggtgcggcactgcaagcatgcgtttggctgtgcgctggtgcacacctctggctggaaagtggtctattccggggacaccatgccctgcgaggctctggtccggatgggtgagtagaggaagaagcaagccaccctgaggttgctctggggtttgtgtagctggaggtgaatgcaggtgggcttgcagggaaacgtcagcagaggcaggagactcaggtccccaccctcagagtctctggttgtcatcctagtaggcagacccagggccaggggagctgagtgttgagaccaggaaacagcacgtgactgaggcctgtgtgccgctctcgcagagaactctgccctgatccttgtgctgcttctccagggaaagatgccaccctcctgatacatgaagccaccctggaagatggtttggaagaggaagcagtggaaaagacacacaggtagcaaaggccggtcagtccttgtcgcccacatcctctccctcccccactacgtgacactgagcagccgtcgtttgtctccactgatgtggggctgccctgcttcctatcaagggctatgggggcttccttgacctgtggcagtgctcacaggctcttgg

SEQ ID NO: 334 - DNA, 1079 bp, Homo sapiens
gattgatcagttcgctgttgcgaacatgtgatttggaagaggtaaggggcacagccgcaggcatcatgggggcgaggtggggagcagagctgcagagccctccagccccaccctttcagtttcagacctgtctggtgcggcactgcaagcatgcgtttggctgtgcgctggtgcacacctctggctggaaagtggtctattccggggacaccatgccctgcgaggctctggtccggatgggtgagtagaggaagaagcaagccaccctgaggttgctctggggtttgtgtagctggaggtgaatgcaggtgggcttgcagggaaacgtcagcagaggcaggagactcaggtccccaccctcagagtctctggttgtcatcctagtaggcagacccagggccaggggagctgagtgttgagaccaggaaacagcacgtgactgaggcctgtgtgccgctctcgcagagaactctgccctgatccttgtgctgcttctccagggaaagatgccaccctcctgatacatgaagccaccctggaagatggtttggaagaggaagcagtggaaaagacacacaggtagcaaaggccggtcagtccttgtcgcccacatcctctccctcccccactacgtgacactgagcagccgtcgtttgtctccactgatgtggggctgccctgcttcctatcaagggctatgggggcttccttgacctgtggcagtgctcacaggctcttggcctttatttttgcagaattttctaagcaagattctagagtgaggcacagttttttgaaagcatctagaaatcggctgaataaactataagccatgtcagggaattgccaggggaaggcgggggctgggggactgaatttttggctgctaatttcaacgaaagagtgcattaccccaggtgggccctgtggtttctcttgggtgccctcatggacagatttggcagccagcacagagggtgggcttcatccaggggtgtgtgcgaaggctctggccctcaggggagattgtgctggctacggaggtgcccgttaagaaaacccaccagcttccccgggtg

SEQ ID NO: 335 - DNA, 1145 bp, Homo sapiens
gctgccctgcttcctatcaagggctatgggggcttccttgacctgtggcagtgctcacaggctcttggcctttatttttgcagaattttctaagcaagattctagagtgaggcacagttttttgaaagcatctagaaatcggctgaataaactataagccatgtcagggaattgccaggggaaggcgggggctgggggactgaatttttggctgctaatttcaacgaaagagtgcattaccccaggtgggccctgtggtttctcttgggtgccctcatggacagatttggcagccagcacagagggtgggcttcatccaggggtgtgtgcgaaggctctggccctcaggggagattgtgctggctacggaggtgcccgttaagaaaacccaccagcttccccgggtgccctggcagttgatggccagggtctgtgccactgtctgctttgcagtcttgcagttgagttcagcttcagtctgctctgtccttcacctgcagcacaacgtcccaagccatcagcgtggggatgcggatgaacgcggagttcattatgctgaaccacttcagccagcgctatgccaaggtccccctcttcagccccaacttcagcgagaaagtgggagttgcctttgaccacatgaaggtctgtatgtcacacggacagcacagggcggggacggggcagggagacaggactctacacactgagtaggacggtcagctggagtttgctttcttatttggggccaccgtgggaaaaggttatctacccatcactaaccaggtcgaaccaccctgggtttgctggtgagacccacctcctgcaggggccaactagtcttcagtctcagttcactggaaatttctgagaatccttttaggcctggactgctcacacagtcatggcatttgagcctcagcacagacctgtgagacaggtggttgcctcttgtgagtgggaaagccaggcctgacccttggccttccggaatgaaggggcagagccggagccaggcctcgtttttcaggagcttgattttgagagcatctggactgctctcccttccctctccggaggcccttagccaggcctggggagcctctgcccctttagagggttccctccatgccattcttttttcc

SEQ ID NO: 336 - DNA, 2434 bp, Homo sapiens
gtcgaaccaccctgggtttgctggtgagacccacctcctgcaggggccaactagtcttcagtctcagttcactggaaatttctgagaatccttttaggcctggactgctcacacagtcatggcatttgagcctcagcacagacctgtgagacaggtggttgcctcttgtgagtgggaaagccaggcctgacccttggccttccggaatgaaggggcagagccggagccaggcctcgtttttcaggagcttgattttgagagcatctggactgctctcccttccctctccggaggcccttagccaggcctggggagcctctgcccctttagagggttccctccatgccattcttttttccatttcagctgtggcctgttggcttgtgccaaggaaggggcgttggcgctgctgtgtgagcacatgactgcatcccttccagctcctgtcccccacccctgcccctctgagacatgtccttgtcttctattgtgtcttctaggtctgctttggagactttccaacaatgcccaagctgattcccccactgaaagccctgtttgctggcgacatcgaggagatggaggagcgcagggagaagcgggagctgcggcaggtgcgggcggccctcctgtccagggagctggcaggcggcctggaggatggggagcctcagcagaagcgggcccacacagaggagccacaggccaagaaggtcagagcccagtgaagatctgggagaccctgaactcagaaggctgtgtgtcttctgccccacgcacgcacccgtatctgccctccttgctggtagaagctgaagagcacggtcccccaggaggcagctcaggataggtggtatggagctgtgccgaggcttgggctcccacataagcactagtctatagatgcctcttaggactggtgcctggcacagccgcgggccaggaggctgccacacggaagcaagcagatgaactaatttcatttcaaggcagtttttaaagaagtcttggaaacagacggcggcacctttcctctaatccagcaaagtgattccctgcacaccagagacaagcagagtaacaggatcagtgggtctaagtgtccgagacttaacgaaaatagtatttcagctgcaataaagattgagtttgcaattgtgagttcttttgcttcctcctgctgctgctacagagcagggtctgctgtgcaccaccttggagaaggctctctgtgctgtagtgtggcagctgcctggtacccgggtggcttggaagaagtcagctcccgtcgtagtgagcacctctggaacctgtcctcagagagccacccttattcgccaagtctttttgacaactcgagctgtgccagctcacagcagggcgtgctttctctatcaatcaatcaatcaatcaatcaaatcaatcagtgagagcctggctgggctggtgtcattggtcagggaaatgcaagtcttctggtggttctgggtaaaagtggagacaatagatttgctgtgttgttgcttccatactgagaggagtgaggatcactttgccctcgaaggttttgagaaatggcacacggggctggtttccattgtcctccttgcgggatttacagacgtggattagtgctcgacaaatggagagcattttccaaggaagtaagtaagtaaagtaagtaagtaagtaagtaagttgaatctagtatttattgtgtatattccctacccaggagaatgtaaaaagaagagctttaaaaactcaaaagacaagcaagcgagagatcagccagggacctggctttacacaggtggtgaccttcaggctccatcccggtgtgcatttgagattgacggccatgtccccgcaggtttattaaagcaagaacagatgccaagctcagggataataaatctattttaataacgttacttttgacaacgatttgtacatgtatttaaagataacaactttcaacccccacccttaccccagactcccattacaaattgaggcatgacctgcccttgccaggaagtgagcaaagctgcaacatcaaaactctgcacatcccactctcagaggagggtgactttacactgtgttgggaaaaataactaagcatttaaatttttcattgtacacctgtacattggtttagattgaatggctcaaattaaacaaatatagagagatttcatatatacaaatattatatcatgtataggtatattatatcatctatttgaaaaggataaaattttaaactttgactttgcatgcatggcccaaatcttttctcactcccctaatccccaagtgtgaaaaggctacccggtgccctcccggccctcgtccccatgaccagatgggacttcatgagaaggaaatgagcggctgacgctggtgagcaaagcaggccacaccgcag

SEQ ID NO: 337 - DNA, 1500 bp, Homo sapiens
ctggctgggctggtgtcattggtcagggaaatgcaagtcttctggtggttctgggtaaaagtggagacaatagatttgctgtgttgttgcttccatactgagaggagtgaggatcactttgccctcgaaggttttgagaaatggcacacggggctggtttccattgtcctccttgcgggatttacagacgtggattagtgctcgacaaatggagagcattttccaaggaagtaagtaagtaaagtaagtaagtaagtaagtaagttgaatctagtatttattgtgtatattccctacccaggagaatgtaaaaagaagagctttaaaaactcaaaagacaagcaagcgagagatcagccagggacctggctttacacaggtggtgaccttcaggctccatcccggtgtgcatttgagattgacggccatgtccccgcaggtttattaaagcaagaacagatgccaagctcagggataataaatctattttaataacgttacttttgacaacgatttgtacatgtatttaaagataacaactttcaacccccacccttaccccagactcccattacaaattgaggcatgacctgcccttgccaggaagtgagcaaagctgcaacatcaaaactctgcacatcccactctcagaggagggtgactttacactgtgttgggaaaaataactaagcatttaaatttttcattgtacacctgtacattggtttagattgaatggctcaaattaaacaaatatagagagatttcatatatacaaatattatatcatgtataggtatattatatcatctatttgaaaaggataaaattttaaactttgactttgcatgcatggcccaaatcttttctcactcccctaatccccaagtgtgaaaaggctacccggtgccctcccggccctcgtccccatgaccagatgggacttcatgagaaggaaatgagcggctgacgctggtgagcaaagcaggccacaccgcaggccgagcccgtgggccagcgtctccgtggctggtttcacttttcctccacatgctttgggtaacgtaattattgctattcagtttgaacctccagaaagaagagacaggctccaggaccccacagactagtgaactgggtgcctttaggtacgtagaggggtaaaattactctcatatagccaatatatttggggacagggaggccacctttggctcctccagacactgtcaggcttgtttgttttgttttatagattcagaaatataaaatgatataggagctttcagtcacacagtggaaaaaggaaaactgttaggaagtgaaacatttttgttttcagccatttactttggagcccactgatgggggcggcctgaaaggttttccagtggcaagccctcccccaggtagctggcaaaggtcagtgccccaggactgctagaatcctggacctggtccagttgtgggtgagaggggccctgctgtcctgcttccttt

SEQ ID NO: 338 - DNA, 1731 bp, Homo sapiens
aactgcagcgccggggctgggggaggggagcctactcactcccccaactcccgggcggtgactcatcaacgagcaccagcggccagaggtgagcagtcccgggaaggggccgagaggcggggccgccaggtcgggcaggtgtgcgctccgccccgccgcgcgcacagagcgctagtccttcggcgagcgagcaccttcgacgcggtccggggaccccctcgtcgctgtcctcccgacgcggacccgcgtgccccaggcctcgcgctgcccggccggctcctcgtgtcccactcccggcgcacgccctcccgcgagtcccgggcccctcccgcgcccctcttctcggcgcgcgcgcagcatggcgcccccgcaggtcctcgcgttcgggcttctgcttgccgcggcgacggcgacttttgccgcagctcaggaagaatgtgtctgtgaaaactacaagctggccgtaaactgctttgtgaataataatcgtcaatgccagtgtacttcagttggtgcacaaaatactgtcatttgctcaaagctggctgccaaatgtttggtgatgaaggcagaaatgaatggctcaaaacttgggagaagagcaaaacctgaaggggccctccagaacaatgatgggctttatgatcctgactgcgatgagagcgggctctttaaggccaagcagtgcaacggcacctccatgtgctggtgtgtgaacactgctggggtcagaagaacagacaaggacactgaaataacctgctctgagcgagtgagaacctactggatcatcattgaactaaaacacaaagcaagagaaaaaccttatgatagtaaaagtttgcggactgcacttcagaaggagatcacaacgcgttatcaactggatccaaaatttatcacgagtattttgtatgagaataatgttatcactattgatctggttcaaaattcttctcaaaaaactcagaatgatgtggacatagctgatgtggcttattattttgaaaaagatgttaaaggtgaatccttgtttcattctaagaaaatggacctgacagtaaatggggaacaactggatctggatcctggtcaaactttaatttattatgttgatgaaaaagcacctgaattctcaatgcagggtctaaaagctggtgttattgctgttattgtggttgtggtgatagcagttgttgctggaattgttgtgctggttatttccagaaagaagagaatggcaaagtatgagaaggctgagataaaggagatgggtgagatgcatagggaactcaatgcataactatataatttgaagattatagaagaagggaaatagcaaatggacacaaattacaaatgtgtgtgcgtgggacgaagacatctttgaaggtcatgagtttgttagtttaacatcatatatttgtaatagtgaaacctgtactcaaaatataagcagcttgaaactggctttaccaatcttgaaatttgaccacaagtgtcttatatatgcagatctaatgtaaaatccagaacttggactccatcgttaaaattatttatgtgtaacattcaaatgtgtgcattaaatatgcttccacagtaaaatctgaaaaactgatttgtgattgaaagctgcctttctatttacttgagtcttgtacatacatacttttttatgagctatgaaataaaacattttaaactgaatttcttaaaaaaaaaaaaaaa

SEQ ID NO: 339 - DNA, 1500 bp, Homo sapiens
atattacagctaacaaaaaataacatttaaaaacactaaatagtatatatatgaagtatttataattattttaatattgtaataatatagtgtgttgtgatttgaattcatctgcacggaaatcgattactgtcctttctttctatttccctatattttctttccgaaggcgtcatcaacattttggttctttaatagtaaccaaaacccgaaatcatctcggttctcagtatttggctctatgggaacaccttttcttttctctctttttttttttttttgagacggagtcttgctcctgtcgcccaggctggagtgtaatggcacgatctctgctcactgcaacctcagcctccccagtagctgggattacaggcatgcgccaccacgcccggctaattttgtatcttttagtagagacggcgttcctccatgttggtcaggctggtctcgaacttcaaacctcaggtgatccgcccgcctcggcctcccaaagtgctaggattacaggcgtgagccaccgcgctcagcctgggaacaccttttcttacatcttcaagtgctagaaatgcttatgaaaacgaaaaaagaattattaagagtaattataaagaaacactcattttcttcccaagagagccaagatttcttctttcctcttctttcttttttttttctttctaatttcaaaggagtataattaaattgccaggtaaaagctcaaaggtcttttttatagtgttctggaaggttctctgcctgtgtttgtatttcctttagcctccacgttcctctatccagttcccgcacccttccccccaggccccattcttcaaggcttcagagcagcgctcctccggttaaaaggaagtctcagcacagaatcttcaaacctcctcggaggccaccaaagatccctaacgccgccatggagacgaagcacctggggcggggcggagcggggcgcgcgggcccacacctgtggagagggccgcgccccaactgcagcgccggggctgggggaggggagcctactcactcccccaactcccgggcggtgactcatcaacgagcaccagcggccagaggtgagcagtcccgggaaggggccgagaggcggggccgccaggtcgggcaggtgtgcgctccgccccgccgcgcgcacagagcgctagtccttcggcgagcgagcaccttcgacgcggtccggggaccccctcgtcgctgtcctcccgacgcggacccgcgtgccccaggcctcgcgctgcccggccggctcctcgtgtcccactcccggcgcacgccctcccgcgagtcccgggcccctcccgcgcccctcttctcggcgcgcgcgcagcatggcgcccccgcaggtcctcgcgttcgggcttctgcttgccgcggcgacggcgacttttgccgcagctcaggaaggtgaggcgcggattggagcagagttgtggagctgggctgggctggggggcagcggcccccggccct

SEQ ID NO: 340 - DNA, 1434 bp, Homo sapiens
aggattacaggcgtgagccaccgcgctcagcctgggaacaccttttcttacatcttcaagtgctagaaatgcttatgaaaacgaaaaaagaattattaagagtaattataaagaaacactcattttcttcccaagagagccaagatttcttctttcctcttctttcttttttttttctttctaatttcaaaggagtataattaaattgccaggtaaaagctcaaaggtcttttttatagtgttctggaaggttctctgcctgtgtttgtatttcctttagcctccacgttcctctatccagttcccgcacccttccccccaggccccattcttcaaggcttcagagcagcgctcctccggttaaaaggaagtctcagcacagaatcttcaaacctcctcggaggccaccaaagatccctaacgccgccatggagacgaagcacctggggcggggcggagcggggcgcgcgggcccacacctgtggagagggccgcgccccaactgcagcgccggggctgggggaggggagcctactcactcccccaactcccgggcggtgactcatcaacgagcaccagcggccagaggtgagcagtcccgggaaggggccgagaggcggggccgccaggtcgggcaggtgtgcgctccgccccgccgcgcgcacagagcgctagtccttcggcgagcgagcaccttcgacgcggtccggggaccccctcgtcgctgtcctcccgacgcggacccgcgtgccccaggcctcgcgctgcccggccggctcctcgtgtcccactcccggcgcacgccctcccgcgagtcccgggcccctcccgcgcccctcttctcggcgcgcgcgcagcatggcgcccccgcaggtcctcgcgttcgggcttctgcttgccgcggcgacggcgacttttgccgcagctcaggaaggtgaggcgcggattggagcagagttgtggagctgggctgggctggggggcagcggcccccggccctcggcccccgaaacgggcataatagggaggggaccaagaggccgcgctttccagcgtggagaccggacggtgcggccgtgctccggctcaggccctccgcgcggtaggaaacggcgagggccgtcccggggagcagcctcacttcgcagctttgctcgccttggtagggaaatggccttgggcggaggcgggggacaggcagggaacggagtggccacgtccaggtttcctgcggccaccgaaccggtgcctcgcgccctggcgcacccacgtcctcggttcggggtggacttggggttccaaaacagccccagccggtggcggagtctttacgacagggaccagcgggctcgcccttgtccttgcagcgggccccggatgtgggcctcaggcggggacaggcgcccgcagggaggcctccagggccgctatgca

SEQ ID NO: 341 - DNA, 1108 bp, Homo sapiens
tgggaggctgaggcaggaggattgcttgaggccaggagttcaaaaccagcctgggcaacatggcgaaaccccgtatctacaaaaagttaaaaattagccaggcatggtggtgcatggctgtagtcccagctacttgggaggctgagacaggaggatcacttgagccctgtaggtccatgctgcagtaaaccaagattgtgccactgcattccagcctgggccacagagtgagaccctatctttaaaaaaaaaaaaaaaaaaaaaaaaaaaaaacaggaatgcatgcagattaaactatgtgtctgtatacagtatgcaaactttagcaagtgccaggcacttaggcagtagtctatagctgaaaaataaaacattcagaaccactttttaaggttttgtgtccttgtaactttaggcattattattacaatataacttagctgggacatgagagttaatagatccacattttaaagtagattttttttttaattttctagaatgtgtctgtgaaaactacaagctggccgtaaactgctttgtgaataataatcgtcaatgccagtgtacttcagttggtgcacaaaatactgtcatttgctcaaagcgtgagtaaaatatcctaattacctgtaagctttattttgacttaatacttctttaattgatgtgccttgagttggaaagagttttattggcttaaatctgaatcatgttacaaagtaagtgtgggaacacataaatttcaaataatctttgaccctggaactttagagttaattttttttttcccgtaatcatgaaatcagttatttttcagtttggcattaaggtttctttttcagtggctgccaaatgtttggtgatgaaggcagaaatgaatggctcaaaacttgggagaagagcaaaacctgaaggggccctccagaacaatgatgggctttatgatcctgactgcgatgagagcgggctctttaaggccaagcagtgcaacggcacctccatgtgctggtgtgtgaacactgctggggtcagaagaacagacaaggacactgaaataacctgctctgagcgagtgagaacctagtgagtggggctgcctatacta

SEQ ID NO: 342 - DNA, 1241 bp, Homo sapiens
cagtagtctatagctgaaaaataaaacattcagaaccactttttaaggttttgtgtccttgtaactttaggcattattattacaatataacttagctgggacatgagagttaatagatccacattttaaagtagattttttttttaattttctagaatgtgtctgtgaaaactacaagctggccgtaaactgctttgtgaataataatcgtcaatgccagtgtacttcagttggtgcacaaaatactgtcatttgctcaaagcgtgagtaaaatatcctaattacctgtaagctttattttgacttaatacttctttaattgatgtgccttgagttggaaagagttttattggcttaaatctgaatcatgttacaaagtaagtgtgggaacacataaatttcaaataatctttgaccctggaactttagagttaattttttttttcccgtaatcatgaaatcagttatttttcagtttggcattaaggtttctttttcagtggctgccaaatgtttggtgatgaaggcagaaatgaatggctcaaaacttgggagaagagcaaaacctgaaggggccctccagaacaatgatgggctttatgatcctgactgcgatgagagcgggctctttaaggccaagcagtgcaacggcacctccatgtgctggtgtgtgaacactgctggggtcagaagaacagacaaggacactgaaataacctgctctgagcgagtgagaacctagtgagtggggctgcctatactacttgttttcatgctgttcagattcatttaattaaatttatttttgattatgtaatatgatttcatggtttagaattcagaagatatgagtgtccagtgaaaagcttccttctcattccagtccccctcgctacccattggacctccacagaattgatgttattgattattctataaccttccagagatagttgatgaatttgttatatatctgttttattatttttacataaatgatagcatactaggtataatttttcttttatatctttacttaacattattcagtatttcattgttgcattagtagtaaatgtatgtaatttaacctatgtatttgcttattgattgtgttttaaaagtgagatatgcttgttttagggattgtttaatgaaaaggcacagaaacccactcaagctagcttaagcaaaaaaagacttcattggaagggactagaaactggaaaggatgtcaggac

SEQ ID NO: 343 - DNA, 1066 bp, Homo sapiens
cccgggttcaagcaactctcctgccttagcctcctgagtagctgggactacagctataccacacctgactaatttttgtattttagtagagatggggtttcaccatgttggccaggctggtctccaactcctgacctcaggcaatccacccacctccacctcccaaagtgttggattacagttgtgagccaccatgcccgggcctttcatgccttttcatctttttagttgaacagggcatgacactgccagctaaactttgacttaatgtgactttatgtattgtgtccagagaacagagggtcaatattagaaaaggtgttccctcctgggtgtgtcctttatgaaggatgtgtaagggaagaaattataggaatagctactgcataaattttttttctcttagtccttataattcgagaattttaggattagcttattaggaaaatagtatggaagactgagttatagtcaactgacattgtctttttactttatagctggatcatcattgaactaaaacacaaagcaagagaaaaaccttatgatagtaaaagtttgcggacgtaagtgcaattaaatgcatcatattcttgcacagttggtggctcaaatcttccatcctacaccattagaaaaagcaagtctaaatgcttttttatatttctgaaaaataaagttacttgaaatagagttgcaagaatagcacagagattctgggaatacacttcactcagattcaccaattaacattttggcacatttgctttttatatgtgtatgtgtggatgaatatgtgtgtgtgctttacatcagtgtatctatgcatgtataaatatttttcccagaagcacatgagagcaagttgtagacatcaggcccctttacccctaagtacttcagtgtatgttttcctaagaacaaaaggcattcttttatataaaccactatacaacgatcaaatttaggaaaaatttttttttttttttttagacggagtctcgctctgtcacccaggctggcgtgcagtggcgtgatctcagctcactgcaacctgcgcctgccg

SEQ ID NO: 344 - DNA, 1064 bp, Homo sapiens
catcccaaagtgctgggattacaggcatgagccacctcacccgagccttgatgttccctcttaactaaaagcaggttatgcatttttgacaggaaaactacttaagcgatcttgtgtcctttataatacttcacattaggagttgcatgatgtcagcttgtccctttactagtaaagtaaactttggttaaagtggtatccaccaggtttttccactgtgaagttaccattctccctttgtaatccataaataatctatgggcagatacttggatactaagtaaatgttctttttctaattaaactggtacccagcagtttgaatatcaatggatgattccagcctgaatcaattattattatgatagttgcaaaatggcagaaaaattttaactttaatgacagttttagaccctgagctgtctgcttaaagagtagtgcttcttactgttgtgtggtacaaacatttttttttaatacagattttaaattctttacagtgcacttcagaaggagatcacaacgcgttatcaactggatccaaaatttatcacgagtattttggtatgattttttaataagtgagctttagcagacagttggtgagacagtatgttttgagtataaggacagccagtgatttaagtggtggttaaatgcacttactggagcaacagtttcggatctgggtacttaatgtgaatttcctgttactgtttttttttgtttgtttgtttctttaagacagactattgctctcttccccaggctggagtgtcatggcaagatctcggctcaatgtaacctctgcttccaaggttcaagcaattctcatgcctcagcctcccgaggagctgggactacaggcacatgtcaccatgcccagctaatttttgtatttttagtgtcggcggggttttgctatgttggccaggctggtctcgaactcctggcctcaagtgatctgtctgcctcagcctctcaaagtgttgggattacaggtgtgagccaccacgcccggcccattgtttttggttatcgttgttttccttccatagcctttg

SEQ ID NO: 345 - DNA, 1102 bp, Homo sapiens
tcaccacgcctggctaattttgtatttttagtagagatggggtttctccatgttggtcaggctggtcttgaactccggacctcaggtgatccgcccacctcagcctcccaaagtgctgggattacaggcatgagccactgcacccggccttacctttcatttctttagtaatttagttttaaagtagttctaatccaaataaaatactttcatatcttatttaaaaatcttttcaatataagaaaatcctcttaggaaaaattgtacattgtaattatgtttggttgcatggctgtcttatttccctttgatagatttagagacctcccaaagatttcttgattagtgataaacttagttatccactaatggaaaggaacagtgatgcatgtagattatagaaaatcaaacactgaatattctgattctcaattaatgttattttcaaatgattttgattatattagtattaatttgtattattcaatttttttccccagtatgagaataatgttatcactattgatctggttcaaaattcttctcaaaaaactcagaatgatgtggacatagctgatgtggcttattattttgaaaaagatgtgagtatcatcttctttattcctgtgttcaggaatgtagtctatcatgcctcaatgaattaaatatatttcatcacctttttatccacttacagatcaaccaaatggttcgctgctgccgttaattttgtcctccctgtcactcacatgcatcttgcttgtttgtatatttatgcctcttatcaaattgttctgcctaaaatatctcccctctttcttataattcttatttattatctacttggtggttacttagtttgtgcatatatgctcccctatgatatttataatttacacaaataaaagtctgttaaaaaagactgtaactgatatgattaaaatattttgttgaaactttaatatattatagtgaggtattttctgctgaaatatgaggtttgcttcaaaataatctgggcgggggtgaaaggatgaaaggaagaaaagatgaagtaagagaggctatgtgttgttggccttgcatctgggtgataggtaca

SEQ ID NO: 346 - DNA, 1201 bp, Homo sapiens
ttcttataattcttatttattatctacttggtggttacttagtttgtgcatatatgctcccctatgatatttataatttacacaaataaaagtctgttaaaaaagactgtaactgatatgattaaaatattttgttgaaactttaatatattatagtgaggtattttctgctgaaatatgaggtttgcttcaaaataatctgggcgggggtgaaaggatgaaaggaagaaaagatgaagtaagagaggctatgtgttgttggccttgcatctgggtgataggtacatgggcatcattgcactactctttctactttcgtgtatgttgaaaggttcctgtaataaacagttttttaaagttccaataaattagattgttatcactaaaaccataaagattcttggcagcggttcttttggcatacaatttgtatgtaattatatgtggccatggttggtttccttaaatatttttaattccttttctccttttcaatacaggttaaaggtgaatccttgtttcattctaagaaaatggacctgacagtaaatggggaacaactggatctggatcctggtcaaactttaatttattatgttgatgaaaaagcacctgaattctcaatgcagggtctaaaagctggtgttattgctgttattgtggttgtggtgatagcagttgttgctggaattgttgtgctggtgagtacagaacaagtaaaatttcatttaagggtatattttttcaagaaaaagtaatagtggctgggcgcggtggctcaccacacctgttatccctacactttgggaggctgagacaggtggatcacttgagcccaggagtttgagaccacactgggcaacatggtgaaaccttatctgtagtaaaaatacaaaaattagtcagatgtgatggcttgcacctgtggtcccatctacttaggaggctgatgtgggagtggtcagttgagtccaggaggtcaaagctgcagtgagccatgatcacaccactgcactccagcctgggcaacacagcaggaccctgtctcaaaaagaagaaaaaaggaaatatgaaaaagtaacatccatattccaaaacattcagggaaaaaaatcttcatttttaaataatttttttatggtgaatgaatctattgtatctctggtctctttttacaaaagtcattttatgaagcaagaaa

SEQ ID NO: 347 - DNA, 1045 bp, Homo sapiens
cctcggccccacaaagtaccggtgagccaccacgcccagcccaccttatttatttttaagagacagggtcttactctgtagcccaggctggagagcagtgatgccatctccactcactgcaacctctgcctcctgggttcaagcaattctggtgccttagcctcctgagtagctgggactacaggtgcgtgccatgacacctggctaatttttgtatttgtagtagagatggggtttcaccgtgttggctgggctggtctgaaactcctgacctcagatgatcttcccgcttcggcctcccaaagtgccgggattacaggcatgagccactccactggtgtgaaatttttaatttaagaagcaataaatgtttatggatagatgttaaaattagttttttttcagatcaaaattatgtccattaaaagcatatatgtctgtttagataatctttttttgaatagcagtcctaaaacaatagttgtctttcttccactcaggttatttccagaaagaagagaatggcaaagtatgagaaggctgaggtaaatggattacttacctaaatagaaaggccctgttgaatctcttactcctaatcactctaccttcctacacactgatgcatttcagttatactggagtccctttatactgttgtctttagggtcttagggacagtcttagaatgtactcttacctaaatattcttgcgtgagttccatggcagatcaccatctgttttctgcctcatagaagagtggaatgggaagcctatggtttttattctacaaagagtcaacatctaacagaatcttctgaaggcatactccagtggattcaccttggagaaactcattgtgactgatgatctgatttattatctctatgccagtgaaataatcatttaatatgaacttaatttgtcataatctattgtgtactaactagtctatactagtgtgacatcaaagtgtcagattgttagtgtgtttcagtcccttggaattgaatatgaacacttatccttgaaccctatcaataa

SEQ ID NO: 348 - DNA, 1457 bp, Homo sapiens
gcaaggattaaacataatcagtgtaaagtgttggtcccatgcttgccacataagaaaatatttgtcaacagagtggtagttgtcattatcattgtctcagtttgcctgtaactagttgtgtgatctgagacaaacactaattttgaacttgagtttccccacatgtaaaatgaaagattgataatagaaagtaaatcaattttttctagcattaaaaatagtatgcatttaataaaaatcttattcttaatgatctagcttacctccaacttgccctagtcactttggcgatcttgtctctaaatagaaccttgaaaacacttaaatgtgtgtttccttgcaatataactttttctttttttatttaaataagtcttataaatgtgggaaaaaattatcttgtgttcctttaatttcatttttatttaatactattttcagaatgaacaaaagattgaaaaattatttagaatttttttctgtgctttttcctgtttcagataaaggagatgggtgagatgcatagggaactcaatgcataactatataatttgaagattatagaagaagggaaatagcaaatggacacaaattacaaatgtgtgtgcgtgggacgaagacatctttgaaggtcatgagtttgttagtttaacatcatatatttgtaatagtgaaacctgtactcaaaatataagcagcttgaaactggctttaccaatcttgaaatttgaccacaagtgtcttatatatgcagatctaatgtaaaatccagaacttggactccatcgttaaaattatttatgtgtaacattcaaatgtgtgcattaaatatgcttccacagtaaaatctgaaaaactgatttgtgattgaaagctgcctttctatttacttgagtcttgtacatacatacttttttatgagctatgaaataaaacattttaaactgaatttcttaactttgacatttcaaatttcttcttctttttcttttcttttttttttttttttgagatggagtcccactctgttgccaggctggagtgcagtggcacaatctcggctcactgcaacttctgcctcctaggttcaagcgattcttctgcctcagcctcccgagtagctgactacaggcgcccaccaccattcctggctaatttttgtatttttagtagagacaaagtttcaccatattggccacgctagtctcgaactcctgacctcacgatccacccacctctacctcccatagtgctggggttacaggcgtgagccaccgcgcccggcctctttttttctttttgttttgttttttctttttttttttgagacaggatcttgctctgtggcctaggctggagtgtagtggtgcgatctcagctcactgcaggattcaagcgattctcctgcctcagcctaccaagtagctaggattacaggctcccactaccatgcccgg

SEQ ID NO: 349 - DNA, 1500 bp, Homo sapiens
aaaaattatttagaatttttttctgtgctttttcctgtttcagataaaggagatgggtgagatgcatagggaactcaatgcataactatataatttgaagattatagaagaagggaaatagcaaatggacacaaattacaaatgtgtgtgcgtgggacgaagacatctttgaaggtcatgagtttgttagtttaacatcatatatttgtaatagtgaaacctgtactcaaaatataagcagcttgaaactggctttaccaatcttgaaatttgaccacaagtgtcttatatatgcagatctaatgtaaaatccagaacttggactccatcgttaaaattatttatgtgtaacattcaaatgtgtgcattaaatatgcttccacagtaaaatctgaaaaactgatttgtgattgaaagctgcctttctatttacttgagtcttgtacatacatacttttttatgagctatgaaataaaacattttaaactgaatttcttaactttgacatttcaaatttcttcttctttttcttttcttttttttttttttttgagatggagtcccactctgttgccaggctggagtgcagtggcacaatctcggctcactgcaacttctgcctcctaggttcaagcgattcttctgcctcagcctcccgagtagctgactacaggcgcccaccaccattcctggctaatttttgtatttttagtagagacaaagtttcaccatattggccacgctagtctcgaactcctgacctcacgatccacccacctctacctcccatagtgctggggttacaggcgtgagccaccgcgcccggcctctttttttctttttgttttgttttttctttttttttttgagacaggatcttgctctgtggcctaggctggagtgtagtggtgcgatctcagctcactgcaggattcaagcgattctcctgcctcagcctaccaagtagctaggattacaggctcccactaccatgcccggctaatttttgtatttttagtagagaaaaggtttctttttcttttttcttttctttttttctttttttttttttgggggggtgagacagagcctaactctgttgcccaggctggagtgcagtggcacaatctcagctcactgcaacttctgcctcctgggttcaagcaattctcctgcctcagcttcccaagtagctgggactacagatgtgcaccaccatgcccggattatttttgtatttgtagtagagacagagtttcgccatgttggccaggctgatctcgaactcctgacctcaagtgatccacccaccttggtctcccaaagtgctgggattacatgtgtgagccaccatgcctggtcctatttactctttgttaagtggaagtggatcatcataaaggtcttgatcctcatagttttcactttgagtaggctgaggaagaggaagggttggtcttgctgtctctgggtcgcagaggcagaagaggtggaggagg

SEQ ID NO: 350 - DNA, 5460 bp, Homo sapiens
cgggcgcagggagccgccgccggggctgtaggcgccaaggccatgtccgactcgtgggtcccgaactccgcctcgggccaggacccagggggccgccggagggcctgggccgagctgctggcgggaagggtcaagagggaaaaatataatcctgaaagggcacagaaattaaaggaatcagctgtgcgcctcctgcgaagccatcaggacctgaatgcccttttgcttgaggtagaaggtccactgtgtaaaaaattgtctctcagcaaagtgattgactgtgacagttctgaggcctatgctaatcattctagttcatttataggctctgctttgcaggatcaagcctcaaggctgggggttcccgtgggtattctctcagccgggatggttgcctctagcgtgggacagatctgcacggctccagcggagaccagtcaccctgtgctgctgactgtggagcagagaaagaagctgtcttccctgttagagtttgctcagtatttattggcacacagtatgttctcccgtctttccttctgtcaagaattatggaaaatacagagttctttgttgcttgaagcggtgtggcatcttcacgtacaaggcattgtgagcctgcaagagctgctggaaagccatcccgacatgcatgctgtgggatcgtggctcttcaggaatctgtgctgcctttgtgaacagatggaagcatcctgccagcatgctgacgtcgccagggccatgctttctgattttgttcaaatgtttgttttgaggggatttcagaaaaactcagatctgagaagaactgtggagcctgaaaaaatgccgcaggtcacggttgatgtactgcagagaatgctgatttttgcacttgacgctttggctgctggagtacaggaggagtcctccactcacaagatcgtgaggtgctggttcggagtgttcagtggacacacgcttggcagtgtaatttccacagatcctctgaagaggttcttcagtcataccctgactcagatactcactcacagccctgtgctgaaagcatctgatgctgttcagatgcagagagagtggagctttgcgcggacacaccctctgctcacctcactgtaccgcaggctctttgtgatgctgagtgcagaggagttggttggccatttgcaagaagttctggaaacgcaggaggttcactggcagagagtgctctcctttgtgtctgccctggttgtctgctttccagaagcgcagcagctgcttgaagactgggtggcgcgtttgatggcccaggcattcgagagctgccagctggacagcatggtcactgcgttcctggttgtgcgccaggcagcactggagggcccctctgcgttcctgtcatatgcagactggttcaaggcctcctttgggagcacacgaggctaccatggctgcagcaagaaggccctggtcttcctgtttacgttcttgtcagaactcgtgccttttgagtctccccggtacctgcaggtgcacattctccacccacccctggttcccggcaagtaccgctccctcctcacagactacatctcattggccaagacacggctggccgacctcaaggtttctatagaaaacatgggactctacgaggatttgtcatcagctggggacattactgagccccacagccaagctcttcaggatgttgaaaaggccatcatggtgtttgagcatacggggaacatcccagtcaccgtcatggaggccagcatattcaggaggccttactacgtgtcccacttcctccccgccctgctcacacctcgagtgctccccaaagtccctgactcccgtgtggcgtttatagagtctctgaagagagcagataaaatccccccatctctgtactccacctactgccaggcctgctctgctgctgaagagaagccagaagatgcagccctgggagtgagggcagaacccaactctgctgaggagcccctgggacagctcacagctgcactgggagagctgagagcctccatgacagaccccagccagcgtgatgttatatcggcacaggtggcagtgatttctgaaagactgagggctgtcctgggccacaatgaggatgacagcagcgttgagatatcaaagattcagctcagcatcaacacgccgagactggagccacgggaacacatggctgtggacctcctgctgacgtctttctgtcagaacctgatggctgcctccagtgtcgctcccccggagaggcagggtccctgggctgccctcttcgtgaggaccatgtgtggacgtgtgctccctgcagtgctcacccggctctgccagctgctccgtcaccagggcccgagcctgagtgccccacatgtgctggggttggctgccctggccgtgcacctgggtgagtccaggtctgcgctcccagaggtggatgtgggtcctcctgcacctggtgctggccttcctgtccctgcgctctttgacagcctcctgacctgtaggacgagggattccttgttcttctgcctgaaattttgtacagcagcaatttcttactctctctgcaagttttcttcccagtcacgagatactttgtgcagctgcttatctccaggccttattaaaaagtttcagttcctcatgttcagattgttctcagaggcccgacagcctctttctgaggaggacgtagccagcctttcctggagacccttgcaccttccttctgcagactggcagagagctgccctctctctctggacacacagaaccttccgagaggtgttgaaagaggaagatgttcacttaacttaccaagactggttacacctggagctggaaattcaacctgaagctgatgctctttcagatactgaacggcaggacttccaccagtgggcgatccatgagcactttctccctgagtcctcggcttcagggggctgtgacggagacctgcaggctgcgtgtaccattcttgtcaacgcactgatggatttccaccaaagctcaaggagttatgaccactcagaaaattctgatttggtctttggtggccgcacaggaaatgaggatattatttccagattgcaggagatggtagctgacctggagctgcagcaagacctcatagtgcctctcggccacaccccttcccaggagcacttcctctttgagattttccgcagacggctccaggctctgacaagcgggtggagcgtggctgccagccttcagagacagagggagctgctaatgtacaaacggatcctcctccgcctgccttcgtctgtcctctgcggcagcagcttccaggcagaacagcccatcactgccagatgcgagcagttcttccacttggtcaactctgagatgagaaacttctgctcccacggaggtgccctgacacaggacatcactgcccacttcttcaggggcctcctgaacgcctgtctgcggagcagagacccctccctgatggtcgacttcatactggccaagtgccagacgaaatgccccttaattttgacctctgctctggtgtggtggccgagcctggagcctgtgctgctctgccggtggaggagacactgccagagcccgctgccccgggaactgcagaagctacaagaaggccggcagtttgccagcgatttcctctcccctgaggctgcctccccagcacccaacccggactggctctcagctgctgcactgcactttgcgattcaacaagtcagggaagaaaacatcaggaagcagctaaagaagctggactgcgagagagaggagctattggttttccttttcttcttctccttgatgggcctgctgtcgtcacatctgacctcaaatagcaccacagacctgccaaaggctttccacgtttgtgcagcaatcctcgagtgtttagagaagaggaagatatcctggctggcactctttcagttgacagagagtgacctcaggctggggcggctcctcctccgtgtggccccggatcagcacaccaggctgctgcctttcgctttttacagtcttctctcctacttccatgaagacgcggccatcagggaagaggccttcctgcatgttgctgtggacatgtacttgaagctggtccagctcttcgtggctggggatacaagcacagtttcacctccagctggcaggagcctggagctcaagggtcagggcaaccccgtggaactgataacaaaagctcgtctttttctgctgcagttaatacctcggtgcccgaaaaagagcttctcacacgtggcagagctgctggctgatcgtggggactgcgacccagaggtgagcgccgccctccagagcagacagcaggctgcccctgacgctgacctgtcccaggagcctcatctcttctgacgggacctgccactgcacaccagcccagctcccgtgtaaataatttattacaagcataacatggagctcttgttgcactaaaaagtggattacaaatctcctcgactgctttagtggggaaaggaatcaattatttatgaactgtccggccccgagtcactcagcgtttgcgggaaaataaaccactggtcccagagcagaggaaggctacttgagccggacaccaagcccgcctccagcaccaagggcgggcagcaccctccgaccctcccatgcgggtgcacacgaagggtgaggctgacacagccactgcggagtccaggctgctagaggtgctcatcctcactgccgtcctcaggtgggttcgggcttcaccgcctggccctctgtggtcacagaggggctcggtggcccaggtggtggttccgcctccaggggcagggccttgtcctgggtctgtgtcagcgggtgcaccatggacatgtgtacattgaggttgtgggccttctcaaaccgccggccacactggtcacaggcaaagtccagctcagtctcagccttgtgtttggtcatgtggtacttgagggatgcccgctgcctgcactggaacccacagacctcacacctgggggacagaggcagataagaaggtgcgagggccacagccctgggagggggtcctgactcacacttactgcaaaggcttggctcccgaatgtcgcatttggtggacgagaaggtgcttccgctgcttgaaggtttgtccacattcgtcacagatatagttccgcacctctgagaggggagagtccagtgagtccaggcccctgatgctccaacctcccggggggacgacgatgacaatgtgaaaccatcacagctgggaagacatttctgcacatggttcaccatgcagtgggcccaagcaaggggcctatgagggcctcgtttattaagatctttaaactgctttatacactgtcacgtggcttcatcagctgtgtgcatttcaggatggtttttaaagaaacctcagaaagctatttcctt

SEQ ID NO: 351 - DNA, 1673 bp, Homo sapiens
cgggcgcagggagccgccgccggggctgtaggcgccaaggccatgtccgactcgtgggtcccgaactccgcctcgggccaggacccagggggccgccggagggcctgggccgagctgctggcgggaagggtcaagagggaaaaatataatcctgaaagggcacagaaattaaaggaatcagctgtgcgcctcctgcgaagccatcaggacctgaatgcccttttgcttgaggtagaaggtccactgtgtaaaaaattgtctctcagcaaagtgattgactgtgacagttctgaggcctatgctaatcattctagttcatttataggctctgctttgcaggatcaagcctcaaggctgggggttcccgtgggtattctctcagccgggatggttgcctctagcgtgggacagatctgcacggctccagcggagaccagtcaccctgtgctgctgactgtggagcagagaaagaagctgtcttccctgttagagtttgctcagtatttattggcacacagtatgttctcccgtctttccttctgtcaagaattatggaaaatacagagttctttgttgcttgaagcggtgtggcatcttcacgtacaaggcattgtgagcctgcaagagctgctggaaagccatcccgacatgcatgctgtgggatcgtggctcttcaggaatctgtgctgcctttgtgaacagatggaagcatcctgccagcatgctgacgtcgccagggccatgctttctgattttgttcaaatgtttgttttgaggggatttcagaaaaactcagatctgagaagaactgtggagcctgaaaaaatgccgcaggtcacggttgatgtactgcagagaatgctgatttttgcacttgacgctttggctgctggagtacaggaggagtcctccactcacaagatcgtgaggtgctgagcttcagcagcccgctcctgagcacacttcctctgccagttacgataacgtgcgtgaggaggaggcgaccatgggaaagcccggggaacgctctggtcagccttttcctgtgaggatgaggtcggaaggtgcgcccactgcagtatcctgttccgcctctggaagtcctgcaccaatgtttgtcccactcactgtgacctcctcctgtgtggagtctccccttgctcctccttccctgggtgtgattcaggctctagagctggccctgcctctcagccccccacatttctagaacacactgtagctgtgcctctacagactcccgctgcctggcctccacagatcctgctcagattcaccagtaggcaaagcttggccctattagctttttctctccatggctctgtggagatgtgcggagacccttacaggtcgggaggcggaagctgaggagtgggggctgggtggaaggtggacatcggggtttggtggaaatggggctctggggtttgcttccctctagtgtgggcaggggaccttgaagtgaagtcttgagaaaccagtagaatttgccactgtttccaggccttgtcaaccttttcattctttattttgctcctcatttcccatccctcacagtaactgtttaactgctcaattaaatgtgttgtaccgttcggtacttttactgaaacagtgaataaagcactgtgtgatttcaaaaaaaaaaaaaaaaa

SEQ ID NO: 352 - DNA, 3008 bp, Homo sapiens
agcgcgctggcgggaggtttggagcagatggataccgtatcgacgtggggcctccggtatgttgccgctgcgttgagtttcataagtacaagccagacctttgatttacctaccctatcttctttactgatgaagctgaaactactttgtgatgcctattgtcccagatctttctgttaattgcctaacaacaaaccagtttagaaacatcaactggaatcaatttgcatttgaaaattagatcagcacaaagacttgatattgtggaatgactagcaaacaagcaatgtcatctaacgaacaagaaaggctcttgtgttataatggggaagtccttgttttccagttgtctaaaggaaattttgcagataaagagcctacaaaaacacccatattacatgtcagaagaatggtatttgacagaggaacaaaagtatttgttcagaagtccactggattttttaccataaaggaagaaaactctcatttaaaaatcatgtgttgcaactgtgtgtcagatttcagaactggaattaacctcccttacattgtgatagaaaaaaataaaaagaataatgtttttgaatattttttactaatccttcacagtactaataaatttgaaatgcgtttgagttttaaactaggctatgagatgaaggatggcctaagggtccttaatggccctttaattttatggaggcatgtcaaagcattcttctttatctcttctcaaactggcaaagttgttagtgtgtcaggtaacttttcctctattcagtgggcaggggagattgaaaatttaggtatggttttattgggactaaaggaatgttgtttatctgaggaagaatgtactcaagagccttcaaaatcagattatgcaatttggaataccaaattttgtgtatattctcttgaaagtcaagaagtattaagtgatatatacattattcctcctgcttacagcagtgtggtgacttatgtacatatttgtgcaactgagatcatcaaaaaccagttaagaatatctctcattgcccttactcgaaagaatcagctgatttcatttcagaatggaactcctaaaaatgtgtgccagcttccatttggagatccttgtgcagttcaacttatggattcaggtggaggaaacctctttttcgttgtatcctttatatccaataatgcttgtgctgtatggaaagagagctttcaggttgctgctaaatgggaaaaacttagcttagtactgatagatgactttattggaagtggaactgaacaagtactcctactttttaaggactccttgaactcagactgcctgacttcatttaaaataacggatcttggaaaaataaactattcgagtgaaccatcagattgcaatgaagatgacttatttgaagacaaacaagagaatcgttacctggtggttccacctctagaaacaggactgaaagtttgtttttcttcttttcgggaattacggcagcatctgttgcttaaggaaaaaattatttcaaaatcttacaaagctttaataaacctagttcaaggaaaagatgataatacgtcaagtgcagaggagaaggaatgtcttgttcctctttgtggtgaagaagaaaattctgtccatatcttagatgaaaagttatcagacaattttcaagattcagaacagctagtagagaagatatggtatcgtgtaatagatgatagcttggttgttggagtgaaaactacatcttctttgaagctgtccctgaatgatgtgactttatcattgttaatggatcaagcccatgactccagatttcggcttctaaagtgtcaaaatagggtgattaagttgagtacaaatcctttcccagcaccatacttgatgccatgtgaaataggattggaagcaaaaagggtcacgttgacccctgatagcaagaaagaggaaagctttgtttgtgaacacccatctaagaaagagtgtgtacagataattactgctgtaacatctctttcaccacttttaacattcagtaaattttgttgcactgtactgctacaaattatggagagagaaagtggtaactgtcctaaagatcgttatgttgtgtgtggcagagtttttttaagtctagaagatctttcaactgggaagtacctactgacatttccaaagaagaaacctatagagcacatggaagatctttttgcacttcttgcagcattccataaatcttgttttcaaatcacatcacccggctatgccctgaattcaatgaaggtgtggctcttagaacatatgaaatgtgaaataatcaaagaatttccagaagtgtacttttgtgaaagaccgggaagtttctatgggacactcttcacttggaaacagagaacaccattcgaagggattttaataatctattccaggaatcaaacagttatgttccagtgccttcataatctcatcagaattctccctataaactgtttcctcaaaaatctaaaatcaggaagtgagaatttcctaattgataatatggcatttactttggagaaggaactagtcacccttagttctctttcttctgccatagctaaacatgaaagcaattttatgcagaggtgtgaagtgagcaaaggaaagagtagtgtcgtcgcggctgctttatcagacagaagggaaaatatccatccctacagaaaagaacttcagagagaaaagaagaaaatgttgcaaacgaacctaaaagtgagtggtgccctttacagagaaataactttgaaagtagctgaggttcagttgaaatcagactttgctgcacagaaactgagtaatttataattataatttcaatttgatcatattttaaaatatgttttcaccaccatataagattttggttctacttgctatatgcctcctttgtaaaaataaacaccgaggcttactgtagtagaaactttagttttgatgatgcacaaaataaacagcagtggttctc

SEQ ID NO: 353 - DNA, 2887 bp, Homo sapiens
agcgcgctggcgggaggtttggagcagatggataccgtatcgacgtggggcctccggtatgttgccgctgcgttgaggtttagaaacatcaactggaatcaatttgcatttgaaaattagatcagcacaaagacttgatattgtggaatgactagcaaacaagcaatgtcatctaacgaacaagaaaggctcttgtgttataatggggaagtccttgttttccagttgtctaaaggaaattttgcagataaagagcctacaaaaacacccatattacatgtcagaagaatggtatttgacagaggaacaaaagtatttgttcagaagtccactggattttttaccataaaggaagaaaactctcatttaaaaatcatgtgttgcaactgtgtgtcagatttcagaactggaattaacctcccttacattgtgatagaaaaaaataaaaagaataatgtttttgaatattttttactaatccttcacagtactaataaatttgaaatgcgtttgagttttaaactaggctatgagatgaaggatggcctaagggtccttaatggccctttaattttatggaggcatgtcaaagcattcttctttatctcttctcaaactggcaaagttgttagtgtgtcaggtaacttttcctctattcagtgggcaggggagattgaaaatttaggtatggttttattgggactaaaggaatgttgtttatctgaggaagaatgtactcaagagccttcaaaatcagattatgcaatttggaataccaaattttgtgtatattctcttgaaagtcaagaagtattaagtgatatatacattattcctcctgcttacagcagtgtggtgacttatgtacatatttgtgcaactgagatcatcaaaaaccagttaagaatatctctcattgcccttactcgaaagaatcagctgatttcatttcagaatggaactcctaaaaatgtgtgccagcttccatttggagatccttgtgcagttcaacttatggattcaggtggaggaaacctctttttcgttgtatcctttatatccaataatgcttgtgctgtatggaaagagagctttcaggttgctgctaaatgggaaaaacttagcttagtactgatagatgactttattggaagtggaactgaacaagtactcctactttttaaggactccttgaactcagactgcctgacttcatttaaaataacggatcttggaaaaataaactattcgagtgaaccatcagattgcaatgaagatgacttatttgaagacaaacaagagaatcgttacctggtggttccacctctagaaacaggactgaaagtttgtttttcttcttttcgggaattacggcagcatctgttgcttaaggaaaaaattatttcaaaatcttacaaagctttaataaacctagttcaaggaaaagatgataatacgtcaagtgcagaggagaaggaatgtcttgttcctctttgtggtgaagaagaaaattctgtccatatcttagatgaaaagttatcagacaattttcaagattcagaacagctagtagagaagatatggtatcgtgtaatagatgatagcttggttgttggagtgaaaactacatcttctttgaagctgtccctgaatgatgtgactttatcattgttaatggatcaagcccatgactccagatttcggcttctaaagtgtcaaaatagggtgattaagttgagtacaaatcctttcccagcaccatacttgatgccatgtgaaataggattggaagcaaaaagggtcacgttgacccctgatagcaagaaagaggaaagctttgtttgtgaacacccatctaagaaagagtgtgtacagataattactgctgtaacatctctttcaccacttttaacattcagtaaattttgttgcactgtactgctacaaattatggagagagaaagtggtaactgtcctaaagatcgttatgttgtgtgtggcagagtttttttaagtctagaagatctttcaactgggaagtacctactgacatttccaaagaagaaacctatagagcacatggaagatctttttgcacttcttgcagcattccataaatcttgttttcaaatcacatcacccggctatgccctgaattcaatgaaggtgtggctcttagaacatatgaaatgtgaaataatcaaagaatttccagaagtgtacttttgtgaaagaccgggaagtttctatgggacactcttcacttggaaacagagaacaccattcgaagggattttaataatctattccaggaatcaaacagttatgttccagtgccttcataatctcatcagaattctccctataaactgtttcctcaaaaatctaaaatcaggaagtgagaatttcctaattgataatatggcatttactttggagaaggaactagtcacccttagttctctttcttctgccatagctaaacatgaaagcaattttatgcagaggtgtgaagtgagcaaaggaaagagtagtgtcgtcgcggctgctttatcagacagaagggaaaatatccatccctacagaaaagaacttcagagagaaaagaagaaaatgttgcaaacgaacctaaaagtgagtggtgccctttacagagaaataactttgaaagtagctgaggttcagttgaaatcagactttgctgcacagaaactgagtaatttataattataatttcaatttgatcatattttaaaatatgttttcaccaccatataagattttggttctacttgctatatgcctcctttgtaaaaataaacaccgaggcttactgtagtagaaactttagttttgatgatgcacaaaataaacagcagtggttctc

SEQ ID NO: 354 - DNA, 4612 bp, Homo sapiens
agaatgcactgctgacacgtgtgcgcgcgcgcggctccactgccgggcgaccgcgggaaaattccaaaaaaactcaaaaagccaatacgaggcaaagccaaattttcaagccacagatcccgggcggtggcttcctttccgccactgcccaaactgctgaagcagctcccgcgaggaccacccgatttaatgtgtgccgaccatttccttcagtgctggacaggctgctgtgaagggacatcaccttttcgctttttccaagatggctcaagattcagtagatctttcttgtgattatcagttttggatgcagaagctttctgtatgggatcaggcttccactttggaaacccagcaagacacctgtcttcacgtggctcagttccaggagttcctaaggaagatgtatgaagccttgaaagagatggattctaatacagtcattgaaagattccccacaattggtcaactgttggcaaaagcttgttggaatccttttattttagcatatgatgaaagccaaaaaattctaatatggtgcttatgttgtctaattaacaaagaaccacagaattctggacaatcaaaacttaactcctggatacagggtgtattatctcatatactttcagcactcagatttgataaagaagttgctcttttcactcaaggtcttgggtatgcacctatagattactatcctggtttgcttaaaaatatggttttatcattagcgtctgaactcagagagaatcatcttaatggatttaacactcaaaggcgaatggctcccgagcgagtggcgtccctgtcacgagtttgtgtcccacttattaccctgacagatgttgaccccctggtggaggctctcctcatctgtcatggacgtgaacctcaggaaatcctccagccagagttctttgaggctgtaaacgaggccattttgctgaagaagatttctctccccatgtcagctgtagtctgcctctggcttcggcaccttcccagccttgaaaaagcaatgctgcatctttttgaaaagctaatctccagtgagagaaattgtctgagaaggatcgaatgctttataaaagattcatcgctgcctcaagcagcctgccaccctgccatattccgggttgttgatgagatgttcaggtgtgcactcctggaaaccgatggggccctggaaatcatagccactattcaggtgtttacgcagtgctttgtagaagctctggagaaagcaagcaagcagctgcggtttgcactcaagacctactttccttacacttctccatctcttgccatggtgctgctgcaagaccctcaagatatccctcggggacactggctccagacactgaagcatatttctgaactgctcagagaagcagttgaagaccagactcatgggtcctgcggaggtccctttgagagctggttcctgttcattcacttcggaggatgggctgagatggtggcagagcaattactgatgtcggcagccgaaccccccacggccctgctgtggctcttggccttctactacggcccccgtgatgggaggcagcagagagcacagactatggtccaggtgaaggccgtgctgggccacctcctggcaatgtccagaagcagcagcctctcagcccaggacctgcagacggtagcaggacagggcacagacacagacctcagagctcctgcacaacagctgatcaggcaccttctcctcaacttcctgctctgggctcctggaggccacacgatcgcctgggatgtcatcaccctgatggctcacactgctgagataactcacgagatcattggctttcttgaccagaccttgtacagatggaatcgtcttggcattgaaagccctagatcagaaaaactggcccgagagctccttaaagagctgcgaactcaagtctagaaggcacgcaggccgtgtgggtgcccggcgtgagggatcaggctcgccagggccacaggacaggtgatgacctgtggccacgcatttgtggagtaagtgccctcgctgggctgtgagaatgagctgtacacatcttgggacaatctgctagtatctattttacaaaatgcagagccaggtccctcagcccagactcagtcagacatgttcactaatgactcaagtgagccttcggtactcctggtgcccgcccggccagaccgtcagcttgataattactaaagcaaaggcctgggtgggagaacaggtttctagtttttacccaagtcaagctgcacatctattatttaaaaattcaaagtcttagaaccaagaatttggtcatgaaccattaaagaatttagagagaacttagctctttttagactctttttaggagtcagggatctgggataaagccacactgtcttgctgtatggagaaattcttcaaggggagtcagggtccctcaggcttcccttgtgtctccctggacctgcctgacaggccacaggagcagacagcacacccaagcccgggcctccggcacactctttccactctgtatttgctaaatgatgctaactgctaccaaaaggcccttgggacatcagaggagccggcaggcgaaggtagaggatgtgttccagaaacattagaaggcaggattaattcagttagttagttctcttgttaaatggaaatgggaattggaaattcctgataaagaattggcctggctgggtgcagtggctcacacctgtgatcccagcactttgggaggccaaggcagggggattacttcagcccaggagttccagactgcctggctaacatggcaataccctatctctactaaaaatacaaaaattatcggggtgcaatggcatgcatctgtaatcccagctattcaagaggctgaggcatgaggatctcttgaacccgggaggtgggagttgtagtgagccgagatcatgacactgcactccagcctgggcaacagagcgagaccatctcttaaaaaaaggcattgttagtgtaatctcaaggttaacatttatttcatgtcagtacagggtgctttttcctttcagggacattctggaattgtattggttgtacattcttttgtgtctattctgtttgtcaagtgagtcaagacttgcttttgtccattttgatttgtgtgtattagtctgagtcttggctccgttttgaggtatgagcaaagttttgctggattagaagttaacctttagggaaattccttattttggtatgtggcaatgctaatagatccactgaagatctggaaaattccaggaacttttcacctgagcctttcttctgagaaatgctgcagtcagaagggtgtgctggtaaagtattttggtggcagctgccatcatggtcattgccttcatataacatgcttcgtgctcatggtcattgccttcatataacatgcttcgtgccatcatgatccttgccttcatataacaaacatgcttcgtcagaggtgttggggttgaaaaaggagctgcatgcttcactggagttgagggcctctctcctgttctgactttaagccagaacttgtggctgggccatggaagctgtgactcctctgtggacatggtggcagcagggaacccctagagagaggggccactgggaccaggcctcctgttgtggagggactcctgggacagtcctccaccctgtcctgtggtcctgtgtacagggttggcctcttcctcctcccctgccaggcctctgcccatgccccttccttccttctcctgggactggtgaagctaggcatctggaagacttcttcctagcctggaagccctgacctcggcccatctgcagaatctcccagttccttcacagctgccgagtcctctcacgggtgcggtggaggcggccttgccggtggtgctttctgggcagccaggggttcctgggtgggaggactgtccctctggggacgtggcactgaagtgcctgctggcttcatgtggccctttgccctttcccagcctgagagatgctcaaaggtggggagctgggggagccacccctcggccattccctccacctccaagacaggtggcggccgggcaggcactcttaagcccacctccccctcttgttgccttcgatttcggcaaagcctgggcaggtgccaccgggaaggaatggcatccgagatgctgggcggggacgcggcgtggccgagggggccttgacggcgttggcggggcctgggcacaggggcagccgcagggaggcagggatggcaaggcgtgaagccaccctggaaggaactggaccaaggtcttcagaggtgcgacagggtctggaatctgaccttactctagcaggagtttttgtagactctccctgatagtttagtttttgataaagcatgctggtaaaaccactaccctcagagagagccaaaaatacagaagaggcggagagcgcccctccaaccaggctgttattcccctggactccgtgacatctgtggaattttttagctctttaaaatctgtaatttgttgtctattttttcattctaaataaaacttcagtttgcacctaaaaaaaaaaaaaaaaaaaaaa

SEQ ID NO: 355 - DNA, 4554 bp, Homo sapiens
gggagccggcgctggggtcgcgcggaagggagcccccggagaggcgggagccgggtgttggcgttttggttctttttgttcattgagcgcaggcagctatgtcttcttcaaaggagaggagcaaagatttaatgtgtgccgaccatttccttcagtgctggacaggctgctgtgaagggacatcaccttttcgctttttccaagatggctcaagattcagtagatctttcttgtgattatcagttttggatgcagaagctttctgtatgggatcaggcttccactttggaaacccagcaagacacctgtcttcacgtggctcagttccaggagttcctaaggaagatgtatgaagccttgaaagagatggattctaatacagtcattgaaagattccccacaattggtcaactgttggcaaaagcttgttggaatccttttattttagcatatgatgaaagccaaaaaattctaatatggtgcttatgttgtctaattaacaaagaaccacagaattctggacaatcaaaacttaactcctggatacagggtgtattatctcatatactttcagcactcagatttgataaagaagttgctcttttcactcaaggtcttgggtatgcacctatagattactatcctggtttgcttaaaaatatggttttatcattagcgtctgaactcagagagaatcatcttaatggatttaacactcaaaggcgaatggctcccgagcgagtggcgtccctgtcacgagtttgtgtcccacttattaccctgacagatgttgaccccctggtggaggctctcctcatctgtcatggacgtgaacctcaggaaatcctccagccagagttctttgaggctgtaaacgaggccattttgctgaagaagatttctctccccatgtcagctgtagtctgcctctggcttcggcaccttcccagccttgaaaaagcaatgctgcatctttttgaaaagctaatctccagtgagagaaattgtctgagaaggatcgaatgctttataaaagattcatcgctgcctcaagcagcctgccaccctgccatattccgggttgttgatgagatgttcaggtgtgcactcctggaaaccgatggggccctggaaatcatagccactattcaggtgtttacgcagtgctttgtagaagctctggagaaagcaagcaagcagctgcggtttgcactcaagacctactttccttacacttctccatctcttgccatggtgctgctgcaagaccctcaagatatccctcggggacactggctccagacactgaagcatatttctgaactgctcagagaagcagttgaagaccagactcatgggtcctgcggaggtccctttgagagctggttcctgttcattcacttcggaggatgggctgagatggtggcagagcaattactgatgtcggcagccgaaccccccacggccctgctgtggctcttggccttctactacggcccccgtgatgggaggcagcagagagcacagactatggtccaggtgaaggccgtgctgggccacctcctggcaatgtccagaagcagcagcctctcagcccaggacctgcagacggtagcaggacagggcacagacacagacctcagagctcctgcacaacagctgatcaggcaccttctcctcaacttcctgctctgggctcctggaggccacacgatcgcctgggatgtcatcaccctgatggctcacactgctgagataactcacgagatcattggctttcttgaccagaccttgtacagatggaatcgtcttggcattgaaagccctagatcagaaaaactggcccgagagctccttaaagagctgcgaactcaagtctagaaggcacgcaggccgtgtgggtgcccggcgtgagggatcaggctcgccagggccacaggacaggtgatgacctgtggccacgcatttgtggagtaagtgccctcgctgggctgtgagaatgagctgtacacatcttgggacaatctgctagtatctattttacaaaatgcagagccaggtccctcagcccagactcagtcagacatgttcactaatgactcaagtgagccttcggtactcctggtgcccgcccggccagaccgtcagcttgataattactaaagcaaaggcctgggtgggagaacaggtttctagtttttacccaagtcaagctgcacatctattatttaaaaattcaaagtcttagaaccaagaatttggtcatgaaccattaaagaatttagagagaacttagctctttttagactctttttaggagtcagggatctgggataaagccacactgtcttgctgtatggagaaattcttcaaggggagtcagggtccctcaggcttcccttgtgtctccctggacctgcctgacaggccacaggagcagacagcacacccaagcccgggcctccggcacactctttccactctgtatttgctaaatgatgctaactgctaccaaaaggcccttgggacatcagaggagccggcaggcgaaggtagaggatgtgttccagaaacattagaaggcaggattaattcagttagttagttctcttgttaaatggaaatgggaattggaaattcctgataaagaattggcctggctgggtgcagtggctcacacctgtgatcccagcactttgggaggccaaggcagggggattacttcagcccaggagttccagactgcctggctaacatggcaataccctatctctactaaaaatacaaaaattatcggggtgcaatggcatgcatctgtaatcccagctattcaagaggctgaggcatgaggatctcttgaacccgggaggtgggagttgtagtgagccgagatcatgacactgcactccagcctgggcaacagagcgagaccatctcttaaaaaaaggcattgttagtgtaatctcaaggttaacatttatttcatgtcagtacagggtgctttttcctttcagggacattctggaattgtattggttgtacattcttttgtgtctattctgtttgtcaagtgagtcaagacttgcttttgtccattttgatttgtgtgtattagtctgagtcttggctccgttttgaggtatgagcaaagttttgctggattagaagttaacctttagggaaattccttattttggtatgtggcaatgctaatagatccactgaagatctggaaaattccaggaacttttcacctgagcctttcttctgagaaatgctgcagtcagaagggtgtgctggtaaagtattttggtggcagctgccatcatggtcattgccttcatataacatgcttcgtgctcatggtcattgccttcatataacatgcttcgtgccatcatgatccttgccttcatataacaaacatgcttcgtcagaggtgttggggttgaaaaaggagctgcatgcttcactggagttgagggcctctctcctgttctgactttaagccagaacttgtggctgggccatggaagctgtgactcctctgtggacatggtggcagcagggaacccctagagagaggggccactgggaccaggcctcctgttgtggagggactcctgggacagtcctccaccctgtcctgtggtcctgtgtacagggttggcctcttcctcctcccctgccaggcctctgcccatgccccttccttccttctcctgggactggtgaagctaggcatctggaagacttcttcctagcctggaagccctgacctcggcccatctgcagaatctcccagttccttcacagctgccgagtcctctcacgggtgcggtggaggcggccttgccggtggtgctttctgggcagccaggggttcctgggtgggaggactgtccctctggggacgtggcactgaagtgcctgctggcttcatgtggccctttgccctttcccagcctgagagatgctcaaaggtggggagctgggggagccacccctcggccattccctccacctccaagacaggtggcggccgggcaggcactcttaagcccacctccccctcttgttgccttcgatttcggcaaagcctgggcaggtgccaccgggaaggaatggcatccgagatgctgggcggggacgcggcgtggccgagggggccttgacggcgttggcggggcctgggcacaggggcagccgcagggaggcagggatggcaaggcgtgaagccaccctggaaggaactggaccaaggtcttcagaggtgcgacagggtctggaatctgaccttactctagcaggagtttttgtagactctccctgatagtttagtttttgataaagcatgctggtaaaaccactaccctcagagagagccaaaaatacagaagaggcggagagcgcccctccaaccaggctgttattcccctggactccgtgacatctgtggaattttttagctctttaaaatctgtaatttgttgtctattttttcattctaaataaaacttcagtttgcacctaaaaaaaaaaaaaaaaaaaaaa

SEQ ID NO: 356 - DNA, 2721 bp, Homo sapiens
agaatgcactgctgacacgtgtgcgcgcgcgcggctccactgccgggcgaccgcgggaaaattccaaaaaaactcaaaaagccaatacgaggcaaagccaaattttcaagccacagatcccgggcggtggcttcctttccgccactgcccaaactgctgaagcagctcccgcgaggaccacccgatttaatgtgtgccgaccatttccttcagtgctggacaggctgctgtgaagggacatcaccttttcgctttttccaagatggctcaagattcagtagatctttcttgtgattatcagttttggatgcagaagctttctgtatgggatcaggcttccactttggaaacccagcaagacacctgtcttcacgtggctcagttccaggagttcctaaggaagatgtatgaagccttgaaagagatggattctaatacagtcattgaaagattccccacaattggtcaactgttggcaaaagcttgttggaatccttttattttagcatatgatgaaagccaaaaaattctaatatggtgcttatgttgtctaattaacaaagaaccacagaattctggacaatcaaaacttaactcctggatacagggtgtattatctcatatactttcagcactcagatttgataaagaagttgctcttttcactcaaggtcttgggtatgcacctatagattactatcctggtttgcttaaaaatatggttttatcattagcgtctgaactcagagagaatcatcttaatggatttaacactcaaaggcgaatggctcccgagcgagtggcgtccctgtcacgagtttgtgtcccacttattaccctgacagatgttgaccccctggtggaggctctcctcatctgtcatggacgtgaacctcaggaaatcctccagccagagttctttgaggctgtaaacgaggccattttgctgaagaagatttctctccccatgtcagctgtagtctgcctctggcttcggcaccttcccagccttgaaaaagcaatgctgcatctttttgaaaagctaatctccagtgagagaaattgtctgagaaggatcgaatgctttataaaagattcatcgctgcctcaagcagcctgccaccctgccatattccgggttgttgatgagatgttcaggtgtgcactcctggaaaccgatggggccctggaaatcatagccactattcaggtgtttacgcagtgctttgtagaagctctggagaaagcaagcaagcagctgcggtttgcactcaagacctactttccttacacttctccatctcttgccatggtgctgctgcaagaccctcaagatatccctcggggacactggctccagacactgaagcatatttctgaactgctcagagaagcagttgaagaccagactcatgggtcctgcggaggtccctttgagagctggttcctgttcattcacttcggaggatgggctgagatggtggcagagcaattactgatgtcggcagccgaaccccccacggccctgctgtggctcttggccttctactacggcccccgtgatgggaggcagcagagagcacagactatgatggcatatgtcatggcaacctgcaggcatggtgatctccagccttgtggtcagaggcgttctcctgtccccaccgaggtggccagagacgagacgctgccagcccattctcctgcaaaacgaagacccttcttccccaaggtcatttgatctgttattgctcagctgccatatctgccccagggtcgcgtcctccaaggcgtgccctgcagaggcgggctgttctgaggggtgtgccggcagcagagcctggccacagccagggccctgtctcgctccccagcagcccggccagggcttgcttccatcttgactgtctcctttcttggatcagtcaacagatcctcacattactggctttatttacatctcttactaaagtaatcagatgatattaaccactttgcttctgaaaaagaagttggtcatttcctaaataacagagcagctaagtatgggactggataactgtctgtggcaaagacagttgttattttatgtggaatataataattacaggaagcaatgctttgattaaaggcattggcacctcccttgcaagcattgatttgctaggttcttaaaacttcaactgccagtgctctatgctgatcttagtagttaaagaggacaaggctcattttgtatagagccctgcttctcttggctttggcattttctgttgtttgaaaacacacagactaataaagatgtctgcgtattttgtttaaaggcttgcatggcataggaaagaaaaatagttttagattttaaaaagttgaaatttggtgataatttattttggatcagaaataaagctttgtgaaaaaattataacccacgtatgtatttgaggattgctgtctgattaaaaagaaagctttttatttcttcccctttaaaagatcacgttaagctaaggaaaatcctggttgatgtttttaacagtaataagatgtacggggcacatatggtttttaaagcccttttatattctgtcttatttgattctgaataagctaagttggtagatatgtgttcaattccatcacagtcaaaaggttactgacagagaatcacttttgaagtataaagaaataaattattcaataacacttaaaaaaaaaaaa

SEQ ID NO: 357 - DNA, 5204 bp, Homo sapiens
ggcctggcgggaaagtcgaaaactacgggcggcgacggcttctcggaagtaatttaagtgcacaagacattggtcaaaatggtttccaaaagaagactgtcaaaatctgaggataaagagagcctgacagaagatgcctccaaaaccaggaagcaaccactttccaaaaagacaaagaaatctcatattgctaatgaagttgaagaaaatgacagcatctttgtaaagcttcttaagatatcaggaattattcttaaaacgggagagagtcagaatcaactagctgtggatcaaatagctttccaaaagaagctctttcagaccctgaggagacacccttcctatcccaaaataatagaagaatttgttagtggcctggagtcttacattgaggatgaagacagtttcaggaactgccttttgtcttgtgagcgtctgcaggatgaggaagccagtatgggtgcatcttattctaagagtctcatcaaactgcttctggggattgacatactgcagcctgccattatcaaaaccttatttgagaagttgccagaatatttttttgaaaacaagaacagtgatgaaatcaacatacctcgactcattgtcagtcaactaaaatggcttgacagagttgtggatggcaaggacctcaccaccaagatcatgcagctgatcagtattgctccagagaacctgcagcatgacatcatcaccagcctacctgagatcctaggggattcccagcacgctgatgtggggaaagaactcagtgacctactgatagagaatacttcactcactgtcccaatcctggatgtcctttcaagcctccgacttgacccaaacttcctattgaaggttcgccagttggtgatggataagttgtcgtctattagattggaggatttacctgtgataataaagttcattcttcattccgtaacagccatggatacacttgaggtaatttctgagcttcgggagaagttggatctgcagcattgtgttttgccatcacggttacaggcttcccaagtaaagttgaaaagtaaaggacgagcaagttcctcaggaaatcaagaaagcagcggtcagagctgtattattctcctctttgatgtaataaagtcagctattagatatgagaaaaccatttcagaagcctggattaaggcaattgaaaacactgcctcagtatctgaacacaaggtgtttgacctggtgatgcttttcatcatctatagcaccaatactcagacaaagaagtacattgacagggtgctaagaaataagattcgatcaggctgcattcaagaacagctgctccagagtacattctctgttcattacttagttcttaaggatatgtgttcatccattctgtcgctggctcagagtttgcttcactctctagaccagagtataatttcatttggcagtctcctatacaaatatgcatttaagttttttgacacgtactgccagcaggaagtggttggtgccttagtgacccatatctgcagtgggaatgaagctgaagttgatactgccttagatgtccttctagagttggtagtgttaaacccatctgctatgatgatgaatgctgtctttgtaaagggcattttagattatctggataacatatcccctcagcaaatacgaaaactcttctatgttctcagcacactggcatttagcaaacagaatgaagccagcagccacatccaggatgacatgcacttggtgataagaaagcagctctctagcaccgtattcaagtacaagctcattgggattattggtgctgtgaccatggctggcatcatggcggcagacagaagtgaatcacctagtttgacccaagagagagccaacctgagcgatgagcagtgcacacaggtgacctccttgttgcagttggttcattcctgcagtgagcagtctcctcaggcctctgcactttactatgatgaatttgccaacctgatccaacatgaaaagctggatccaaaagccctggaatgggttgggcataccatctgtaatgatttccaggatgccttcgtagtggactcctgtgttgttccggaaggtgactttccatttcctgtgaaagcactgtacggactggaagaatacgacactcaggatgggattgccataaacctcctgccgctgctgttttctcaggactttgcaaaagatgggggtccggtgacctcacaggaatcaggccaaaaattggtgtctccgctgtgcctggctccgtatttccggttactgagactttgtgtggagagacagcataacggaaacttggaggagattgatggtctactagattgtcctatattcctaactgacctggagcctggagagaagttggagtccatgtctgctaaagagcgttcattcatgtgttctctcatatttcttactctcaactggttccgagagattgtaaatgccttctgccaggaaacatcacctgagatgaaggggaaggtgctcactcggttaaagcacattgtagaattgcaaataatcctggaaaagtacttggcagtcaccccagactatgtccctcctcttggaaactttgatgtggaaactttagatataacacctcatactgttactgctatttcagcaaaaatcagaaagaaaggaaaaatagaaaggaaacaaaaaacagatggcagcaagacatcctcctctgacacactttcagaagagaaaaattcagaatgtgaccctacgccatctcatagaggccagctaaacaaggagttcacagggaaggaagaaaagacatcattgttactacataattcccatgcttttttccgagagctggacattgaggtcttctctattctacattgtggacttgtgacgaagttcatcttagatactgaaatgcacactgaagctacagaagttgtgcaacttgggccccctgagctgcttttcttgctggaagatctctcccagaagctggagagtatgctgacacctcctattgccaggagagtcccctttctcaagaacaaaggaagccggaatattggattctcacatctccaacagagatctgcccaagaaattgttcattgtgtttttcaactgctgaccccaatgtgtaaccacctggagaacattcacaactattttcagtgtttagctgctgagaatcacggtgtagttgatggaccaggagtgaaagttcaggagtaccacataatgtcttcctgctatcagaggctgctgcagatttttcatgggctttttgcttggagtggattttctcaacctgaaaatcagaatttactgtattcagccctccatgtccttagtagccgactgaaacagggagaacacagccagcctttggaggaactactcagccagagcgtccattacttgcagaatttccatcaaagcattcccagtttccagtgtgctctttatctcatcagacttttgatggttattttggagaaatcaacagcttctgctcagaacaaagaaaaaattgcttcccttgccagacaattcctctgtcgggtgtggccaagtggggataaagagaagagcaacatctctaatgaccagctccatgctctgctctgtatctacctggagcacacagagagcattctgaaggccatagaggagattgctggtgttggtgtcccagaactgatcaactctcctaaagatgcatcttcctccacattccctacactgaccaggcatacttttgttgttttcttccgtgtgatgatggctgaactagagaagacggtgaaaaaaattgagcctggcacagcagcagactcgcagcagattcatgaagagaaactcctctactggaacatggctgttcgagacttcagtatcctcatcaacttgataaaggtatttgatagtcatcctgttctgcatgtatgtttgaagtatgggcgtctctttgtggaagcatttctgaagcaatgtatgccgctcctagacttcagttttagaaaacaccgggaagatgttctgagcttactggaaaccttccagttggacacaaggctgcttcatcacctgtgtgggcattccaagattcaccaggacacgagactcacccaacatgtgcctctgctcaaaaagaccctggaacttttagtttgcagagtcaaagctatgctcactctcaacaattgtagagaggctttctggctgggcaatctaaaaaaccgggacttgcagggtgaagagattaagtcccaaaattcccaggagagcacagcagatgagagtgaggatgacatgtcatcccaggcctccaagagcaaagccactgaggtatctctacaaaacccaccagagtctggcactgatggttgcattttgttaattgttctaagttggtggagcagaactttgcctacttatgtttattgtcaaatgcttctatgcccatttccattccctccataacagcttctgtgcttatataatttttgggacccagaagaaacaacgacacaatcttagaatcactcctgagtatctcgagttgtggcatttgttatagagttgacaattttctgcattatagcctctcattttccatgaattcatatctgaaaccattttagaagggagaagtcatcgaagtattttctgagtgttgagaagaatgagttaaaccatttaaacacatttgaaacatacaaaaatagaaatgtgaaagcatttggtgaaagccaaagcacagagtcagaagctgccaccttagagaactgaaataaaaatagaagttcttacgcttttttgtggtacagatgctttcgacaatttaaagaaagctaaataaaaatgtagacatggctggcgcagtggctcatgcttgtaatcctagcactttttgaggccaaggtaggaggattgcttgagtccgggagctcaaggcaaagctgcacaacataacaagaccctatctccacaaaaaaaatgaaaaataaacctgggtgcggtggctcacacctgtaatcccagcactttgggaggccgatgtgggcagatcacaaggtcaggagttcaagaccagcctggccaacatagtgaaaccccatctctactgaaaatacaaaaattagctgggtgtggtggcacgtgcctgttatctcagctacttgggaggctga

SEQ ID NO: 358 - DNA, 5134 bp, Homo sapiens
ggcctggcgggaaagtcgaaaactacgggcggcgacggcttctcggaagtaatttaagtgcacaagacattggtcaaaatggtttccaaaagaagactgtcaaaatctgaggataaagagagcctgacagaagatgcctccaaaaccaggaagcaaccactttccaaaaagacaaagaaatctcatattgctaatgaagttgaagaaaatgacagcatctttgtaaagcttcttaagatatcaggaattattcttaaaacgggagagagtcagaatcaactagctgtggatcaaatagctttccaaaagaagctctttcagaccctgaggagacacccttcctatcccaaaataatagaagaatttgttagtggcctggagtcttacattgaggatgaagacagtttcaggaactgccttttgtcttgtgagcgtctgcaggatgaggaagccagtatgggtgcatcttattctaagagtctcatcaaactgcttctggggattgacatactgcagcctgccattatcaaaaccttatttgagaagttgccagaatatttttttgaaaacaagaacagtgatgaaatcaacatacctcgactcattgtcagtcaactaaaatggcttgacagagttgtggatggcaaggacctcaccaccaagatcatgcagctgatcagtattgctccagagaacctgcagcatgacatcatcaccagcctacctgagatcctaggggattcccagcacgctgatgtggggaaagaactcagtgacctactgatagagaatacttcactcactgtcccaatcctggatgtcctttcaagcctccgacttgacccaaacttcctattgaaggttcgccagttggtgatggataagttgtcgtctattagattggaggatttacctgtgataataaagttcattcttcattccgtaacagccatggatacacttgaggtaatttctgagcttcgggagaagttggatctgcagcattgtgttttgccatcacggttacaggcttcccaagtaaagttgaaaagtaaaggacgagcaagttcctcaggaaatcaagaaagcagcggtcagagctgtattattctcctctttgatgtaataaagtcagctattagatatgagaaaaccatttcagaagcctggattaaggcaattgaaaacactgcctcagtatctgaacacaaggtgtttgacctggtgatgcttttcatcatctatagcaccaatactcagacaaagaagtacattgacagggtgctaagaaataagattcgatcaggctgcattcaagaacagctgctccagagtacattctctgttcattacttagttcttaaggatatgtgttcatccattctgtcgctggctcagagtttgcttcactctctagaccagagtataatttcatttggcagtctcctatacaaatatgcatttaagttttttgacacgtactgccagcaggaagtggttggtgccttagtgacccatatctgcagtgggaatgaagctgaagttgatactgccttagatgtccttctagagttggtagtgttaaacccatctgctatgatgatgaatgctgtctttgtaaagggcattttagattatctggataacatatcccctcagcaaatacgaaaactcttctatgttctcagcacactggcatttagcaaacagaatgaagccagcagccacatccaggatgacatgcacttggtgataagaaagcagctctctagcaccgtattcaagtacaagctcattgggattattggtgctgtgaccatggctggcatcatggcggcagacagaagtgaatcacctagtttgacccaagagagagccaacctgagcgatgagcagtgcacacaggtgacctccttgttgcagttggttcattcctgcagtgagcagtctcctcaggcctctgcactttactatgatgaatttgccaacctgatccaacatgaaaagctggatccaaaagccctggaatgggttgggcataccatctgtaatgatttccaggatgccttcgtagtggactcctgtgttgttccggaaggtgactttccatttcctgtgaaagcactgtacggactggaagaatacgacactcaggatgggattgccataaacctcctgccgctgctgttttctcaggactttgcaaaagatgggggtccggtgacctcacaggaatcaggccaaaaattggtgtctccgctgtgcctggctccgtatttccggttactgagactttgtgtggagagacagcataacggaaacttggaggagattgatggtctactagattgtcctatattcctaactgacctggagcctggagagaagttggagtccatgtctgctaaagagcgttcattcatgtgttctctcatatttcttactctcaactggttccgagagattgtaaatgccttctgccaggaaacatcacctgagatgaaggggaaggtgctcactcggttaaagcacattgtagaattgcaaataatcctggaaaagtacttggcagtcaccccagactatgtccctcctcttggaaactttgatgtggaaactttagatataacacctcatactgttactgctatttcagcaaaaatcagaaagaaaggaaaaatagaaaggaaacaaaaaacagatggcagcaagacatcctcctctgacacactttcagaagagaaaaattcagaatgtgaccctacgccatctcatagaggccagctaaacaaggagttcacagggaaggaagaaaagacatcattgttactacataattcccatgcttttttccgagagctggacattgaggtcttctctattctacattgtggacttgtgacgaagttcatcttagatactgaaatgcacactgaagctacagaagttgtgcaacttgggccccctgagctgcttttcttgctggaagatctctcccagaagctggagagtatgctgacacctcctattgccaggagagtcccctttctcaagaacaaaggaagccggaatattggattctcacatctccaacagagatctgcccaagaaattgttcattgtgtttttcaactgctgaccccaatgtgtaaccacctggagaacattcacaactattttcagtgtttagctgctgagaatcacggtgtagttgatggaccaggagtgaaagttcaggagtaccacataatgtcttcctgctatcagaggctgctgcagatttttcatgggctttttgcttggagtggattttctcaacctgaaaatcagaatttactgtattcagccctccatgtccttagtagccgactgaaacagggagaacacagccagcctttggaggaactactcagccagagcgtccattacttgcagaatttccatcaaagcattcccagtttccagtgtgctctttatctcatcagacttttgatggttattttggagaaatcaacagcttctgctcagaacaaagaaaaaattgcttcccttgccagacaattcctctgtcgggtgtggccaagtggggataaagagaagagcaacatctctaatgaccagctccatgctctgctctgtatctacctggagcacacagagagcattctgaaggccatagaggagattgctggtgttggtgtcccagaactgatcaactctcctaaagatgcatcttcctccacattccctacactgaccaggcatacttttgttgttttcttccgtgtgatgatggctgaactagagaagacggtgaaaaaaattgagcctggcacagcagcagactcgcagcagattcatgaagagaaactcctctactggaacatggctgttcgagacttcagtatcctcatcaacttgataaaggtatttgatagtcatcctgttctgcatgtatgtttgaagtatgggcgtctctttgtggaagcatttctgaagcaatgtatgccgctcctagacttcagttttagaaaacaccgggaagatgttctgagcttactggaaaccttccagttggacacaaggctgcttcatcacctgtgtgggcattccaagattcaccaggacacgagactcacccaacatgtgcctctgctcaaaaagaccctggaacttttagtttgcagagtcaaagctatgctcactctcaacaattgtagagaggctttctggctgggcaatctaaaaaaccgggacttgcagggtgaagagattaagtcccaaaattcccaggagagcacagcagatgagagtgaggatgacatgtcatcccaggcctccaagagcaaagccactgaggatggtgaagaagacgaagtaagtgctggagaaaaggagcaagatagtgatgagagttatgatgactctgattagaccccagataaattgttgcctgcttctgtgtctctgccagcctgtgatcattttgtgttagagtttgaaatccgctgtttgcctttcttactggtaggatccttttttgttcctctttttttttttttttttttttttttaaagacggggactcgctgtgtttcccaggctggagtgcagtgctgcaatcttggctcactgcaacctccatctcctaggttcaagcgattctcctgcctcagcctcctgagtagctgggacgacaggcacatgccaccatgcccagctaatttttgtatttttagtagatacggggttttaccatgtcggccagatggtctcaatctcctgaactcatgatccacctgcctcagcctcccaaagtgctgggattacaggcatgagccaccgctcccagccatattttgttcttaaagtggggtctttattaacttgtggacatcatggattgtctaacaccatcacagtccctggctcaggattctaatgtagcattatttattggtttggataaacccagctgtgctacactgcagagtaaaatctctgagtcatgattctggactttgggagctagttttgaaactctgatttattgtagaacttaggcttgtaccaattttacaaataaattctgttctaagttcaaaaaaaaaaaaaaaaaaaaaaaaaaaaaaaa

SEQ ID NO: 359 - DNA, 2565 bp, Homo sapiens
aacggctgcggcttcgggcggccgggtttctccggtctcccaacgccgaggagagcttgtaacaggcgctggagctggcccgccaccgccgcgtcagggacggcgctggagtcctccgttcccctcagcctctgagctgaggccccacaccagagtagggggcggcgcggcacccgtgccccggcatggcgacaccggacgcggggctccctggggctgagggcgtggagccggcgccctgggcgcagctggaggcccccgcccgcctcctgctgcaggcgctgcaggcggggcctgagggggcgcggcgcggcctgggggtgctccgggcgctgggcagccgcggctgggagcccttcgactggggtcgcttgctcgaggccctgtgccgggaggagccggtcgtgcaggggcctgacggccgtctggagctgaaaccactgttgctgcgattgccccggatatgccagaggaacctgatgtccctgctgatggccgttcggccatcgctgccggaaagtgggctcctctctgtgctgcagattgcccagcaggacctagcccctgacccagatgcctggctccgtgccctgggggaattgctgcgaagggatttgggggtggggacctccatggagggagcttctccactgtctgaaagatgccagagacagctccaaagtctatgtagggggctgggcctggggggcaggaggttgaaatccccccaggctccagaccctgaagaagaggagaacagggactcccagcagcctgggaaacgcagaaaggactcagaggaagaggctgccagtcctgaggggaagagggtccccaaaagattacggtgttgggaagaggaagaagatcatgagaaggagagacccgaacataagtcactggaatccctggcagatggaggaagtgcatctcctattaaggaccagcctgtcatggcagttaagactggcgaggacggttcgaatctggatgatgctaaaggtctggctgagagtttggagttgcccaaagctatccaggaccagcttcccaggctgcagcagctgctgaagaccttggaggaggggttagagggattggaggatgcccccccagttgagctacagcttcttcacgaatgtagtcccagccagatggacttgctgtgtgcccagctgcagctccctcagctctcagacctcggtctcctgcggctctgcacctggctgctggccctttcacctgatctcagcctcagcaatgctactgtgctgaccagaagcctctttcttggacggatcctctccttgacttcctcagcctcccgcctgcttacaactgccctgacctccttctgtgccaaatatacataccctgtctgcagcgccctccttgaccctgtgctccaggccccaggcacaggtcctgctcaaacagagttactgtgttgccttgtgaagatggagtccctggagccagatgcacaggttctaatgctgggacagatcttggagctgccctggaaggaggaaactttcttggtgttgcagtcactcctagagcggcaggtggagatgacccctgagaagttcagtgtcttaatggagaagctctgtaaaaaggggctggcagccaccacctccatggcctatgccaagctcatgctgacagtgatgaccaagtatcaggctaacatcactgagacccagaggctgggcctggctatggccctagaacctaacaccaccttcctgaggaagtccctgaaggccgccttgaaacatttgggcccctgaccatccaccaagggaccaccctcttggtgctccatcaccagcttcctgaagggcatttctttcttcaccaccttgtcttgagccctagcctgaggataaaggctgagcctggccatcccagattgcaactgcctccctgttacaggctgcatagggaatattggcttcccagccagcagggaggctcctgggctaagggagctcagctatattttctttttcatttcttttgtttttgagagaaggtattgctctgtcatccaggctggagtgcagtgatgcgattgatcatggctcactgtaacctctgcctcccaggctcgatcctcccatgtcagcctcccaagtagctgggactacatgcacatgacactatgcccagctaattttttattttgtagataatatgctggtcagggctggtcttgaactcctgagctcaagtgatcttcctgccttggcacccaaagtgttgagatttacaggtgtgagccaccacaccaggccagagctatatttccaaaggctgctggccccaggcacactcctcatcaattctcaggctgcagggacaaactttccgatagggctcagtaggatcaagccgacccagagtgggcatgggatgctccaggaggtctggggtaccagtgggctcagatgaagctcttgtgctcatgtatattatgaccttctgtgtttttgtttctgacttgaataatttatcaatggtgttgaataaaagcaagttcaataatgaaaaaaaaaa

SEQ ID NO: 360 - DNA, 3309 bp, Homo sapiens
tgaaagcggaagtagggccttcgcgcacctcatggaatcccttctgcagcacctggatcgcttttccgagcttctggcggtctcaagcactacctacgtcagcacctgggaccccgccaccgtgcgccgggccttgcagtgggcgcgctacctgcgccacatccatcggcgctttggtcggcatggccccattcgcacggctctggagcggcggctgcacaaccagtggaggcaagagggcggctttgggcggggtccagttccgggattagcgaacttccaggccctcggtcactgtgacgtcctgctctctctgcgcctgctggagaaccgggccctcggggatgcagctcgttaccacctggtgcagcaactctttcccggcccgggcgtccgggacgccgatgaggagacactccaagagagcctggcccgccttgcccgccggcggtctgcggtgcacatgctgcgcttcaatggctatagagagaacccaaatctccaggaggactctctgatgaagacccaggcggagctgctgctggagcgtctgcaggaggtggggaaggccgaagcggagcgtcccgccaggtttctcagcagcctgtgggagcgcttgcctcagaacaacttcctgaaggtgatagcggtggcgctgttgcagccgcctttgtctcgtcggccccaagaagagttggaacccggcatccacaaatcacctggagaggggagccaagtgctagtccactggcttctggggaattcggaagtctttgctgccttttgtcgcgccctcccagccgggcttttgactttagtgactagccgccacccagcgctgtctcctgtctatctgggtctgctaacagactggggtcaacgtttgcactatgaccttcagaaaggcatttgggttggaactgagtcccaagatgtgccctgggaggagttgcacaataggtttcaaagcctctgtcaggcccctccacctctgaaagataaagttctaactgccctggagacctgtaaagcgcaggatggagattttgaagtacctggtcttagcatctggacagacctcttattagctcttcgtagtggtgcatttaggaaaagacaagttttgggtctcagcgcaggcctcagttctgtataggcaatgctgtgttattacttgaatatagaatatatagtttacaaaatgaaaattacaatgttctcaccaaatatatgccttcgtgtgtccaaagtataattattttagatgctaattttgaatagtttattaaacagttataaatatgcaaagtagctggcatgtagtgtcacggattttctggatagaggaagtgattggaagtactccacttaaagccatggaattagcaatagtttgctttttaatagaaggcccatttgtaagaatgttgaaaatatgtgtaccgtttaaagaaaaagcagctttaaagtgacaaacaaaataccctttttcttttagtatggtttatttttctaggttttctgtccctccctcagtagtgaagagttttctttattcctggcagtgtcaggaatattggtttgaaaagctgttggcctatctggagtttggccttgttaacctagtattctaaccagttaaccagccttagtatgcattaaaattgtattgttcagaaagtttgtttctcattttctgcaaattcttactttgaaaatgaatcaccacatagtatgtccctttaaagcattgacgcacagacaaatgtttaaagcacagtaaatacgaatatatgcctttggatattaaattaatgcttgatgataaaagaatcaaacttttttttttttgagatggagtctcgctctgtcacccagactggagtgcagtggtgtgatcactgctcagtgcaacctctgcctcccaggatcaagcaattctgactcagcctcccaagtagctgggattacaggcgcaggccaccatgcccggctaattttttgtatttttagtagagacggggtttcaccatgctggccaggctggtctcaaacacctgaccttgtgatccgtccgccttggcctcccaaagtgctgggattacaggcgtgagccaccgcgcctggccaaaacaacattttaagtagaagatccaggttttagtgcagcttctgccgttaactaggttaataaatcacaaccttggggccacagttgccttatatgtaaatgaagtgtttagaataaaatagttaaatttccttatttttcccttggtggctgccctgtggaaacagtttagaatatttgttttgtgtgtaggaacctagttgtgttagtttacctgggtgttccacagctgatagtgattgccttgaataaattcaagggcaatttattcatttttactagggagatagacctttacagcaatcaagatatttttgtccatatccaggttagctggtaagaggatttttttggagaaaaaaatgatatttagaaagttaatttctaattccggaatggaataaaaacaatatgagtagtgtaatcttgtagaaaaagagttgtataatcttgtagaatttctcattctgtggtacaacccaggggtaaactattattccagtagtcagtacacttttctagataaatcttgagtgaaaaccagcaatttctttttccttgtggtctgattcctttttctaatccatgaaggccatcttgtagattacatttatcattaatgcaagaataaagacaattcctcctgtcagttgcgtgaattttttttaagaaacaacccagtgaagagttctaccatagcaaggcctaatgttagctttagctttagaaaataacagtttgtgaacttacttccctatatttgcagctgtatctcacactatgatttacaataaaattgtaaagattgacaatagacttaagaaataacattttaaaatctattttatacttaccatttattattctgttattttagtctccatatgttcattacatacataatcttatttaatcttcacaccaaaactgtattcttatgaatatacgctaaaagattaagtaaaatgcccaagggtataaacaaaagcaacatgaaagtggaagccgtatctgtcatttattttatttccagaagcctagcacagtgtccagcatatggtagatacttgtagtgtttgaataaatgaaaccagcattagagctttatatactttctcttaaggacttgaaaagattaggaatctacgcatacactgagagagaaaaaagtgagagga

SEQ ID NO: 361 - DNA, 2649 bp, Homo sapiens
aggaggacctgggggtgtggcagcgaggaagggccgagccacggactgtggggccgaaactcgctcccgcccaccctttctcgaggctgtggcctccgcgagagccgagcgggccgcaccgccggccgtgcgactgccccagtcagacacgaccccggcttctagcccgcctaagcctgtttggggttgctgactcgtttcctccccgagtttcccgcgggaactaactcttcaagaggaccaaccgcagcccagagcttcgcagacccggccaaccagaggcgaggttgagagcccggcgggccgcggggagagagcgtcccatctgtcctggaaagcctgggcgggtggattgggaccccgagagaagcaggggagctcggcggggtgcagaagtgcccaggcccctccccgctggggttgggagcttgggcaggccagcttcacccttcctaagtccgcttctggtctccgggcccagcctcggccaccatgtcccgccagaccacctctgtgggctccagctgcctggacctgtggagggaaaagaatgaccggctcgttcgacaggccaaggtggctcagaactccggtctgactctgaggcgacagcagttggctcaggatgcactggaagggctcagagggctcctccatagtctgcaagggctccctgcagctgttcctgttcttcccttggagctgactgtcacctgcaacttcattatcctgagggcaagcttggcccagggtttcacagaggatcaggcccaggatatccagcggagcctagagagagtgctggagacacaggagcagcaggggcccaggttggaacaggggctcagggagctgtgggactctgtccttcgtgcttcctgccttctgccggagctgctgtctgccctgcaccgcctggttggcctgcaggctgccctctggttgagtgctgaccgtcttggggacctggccttgttactagagaccctgaatggcagccagagtggagcctctaaggatctgctgttacttctgaaaacttggagtcccccagctgaggaattagatgctccattgaccctgcaggatgcccagggattgaaggatgtcctcctgacagcatttgcctaccgccaaggtctccaggagctgatcacagggaacccagacaaggcactaagcagccttcatgaagcggcctcaggcctgtgtccacggcctgtgttggtccaggtgtacacagcactggggtcctgtcaccgtaagatgggaaatccacagagagcactgttgtacttggttgcagccctgaaagagggatcagcctggggtcctccacttctggaggcctctaggctctatcagcaactgggggacacaacagcagagctggagagtctggagctgctagttgaggccttgaatgtcccatgcagttccaaagccccgcagtttctcattgaggtagaattactactgccaccacctgacctagcctcaccccttcattgtggcactcagagccagaccaagcacatactagcaagcaggtgcctacagacggggagggcaggagacgctgcagagcattacttggacctgctggccctgttgctggatagctcggagccaaggttctccccacccccctcccctccagggccctgtatgcctgaggtgtttttggaggcagcggtagcactgatccaggcaggcagagcccaagatgccttgactctatgtgaggagttgctcagccgcacatcatctctgctacccaagatgtcccggctgtgggaagatgccagaaaaggaaccaaggaactgccatactgcccactctgggtctctgccacccacctgcttcagggccaggcctgggttcaactgggtgcccaaaaagtggcaattagtgaatttagcaggtgcctcgagctgctcttccgggccacacctgaggaaaaagaacaaggggcagctttcaactgtgagcagggatgtaagtcagatgcggcactgcagcagcttcgggcagccgccctaattagtcgtggactggaatgggtagccagcggccaggataccaaagccttacaggacttcctcctcagtgtgcagatgtgcccaggtaatcgagacacttactttcacctgcttcagactctgaagaggctagatcggagggatgaggccactgcactctggtggaggctggaggcccaaactaaggggtcacatgaagatgctctgtggtctctccccctgtacctagaaagctatttgagctggatccgtccctctgatcgtgacgccttccttgaagaatttcggacatctctgccaaagtcttgtgacctgtagctgccacgttttgaagagcttgagctgggtccccagtgggctgtctctctgtggggagggctttctgcttcaccatcattaggaatgtgaccattcctatataattcctggactggtgagattggtggtaggcctgtgaaatttgccctagttactaccattctcgttttggaggaaacaatctctgccaccaccaagtcattgactttgctcgaggcaccttttttcctgtttctccttttctgttgtcgagtaaaatttcatatttataaaaaaaaaaaaaaaaaa

SEQ ID NO: 362 - DNA, 4749 bp, Homo sapiens
tcttgttgttacgggtaacggaagtgtggcggcgttgggttgagcgggctttttggaagtttgtggcggagttctgtgatatgagcaacaatggaccagaagattttatctctagcagcagaaaaaacagcagacaaactgcaagaatttcttcaaaccctgagagaaggtgatttgactaatctccttcagaatcaagcagtgaaaggaaaagttgctggagcactcctgagagccatcttcaaaggttccccctgctctgaggaagctggaacacttaggagacgtaagatatacacttgttgtatccagttggtggaatcgggggatttgcagaaagaaatagcgtctgagatcataggattactgatgctggaggctcaccattttccaggaccattattggttgaattagccaatgagtttattagtgctgtcagagaaggcagcctagtgaatggaaaatctttggagttactacctatcattctcactgccctggctacgaaaaaggaaaatctggcttatggaaaaggtgtactgagtggggaagaatgtaagaaacagttgattaacaccctgtgttctggcaggtgggatcagcaatatgtaatccaactcacctccatgttcaaggatgtccctctgactgcagaagaggtggaatttgtggtggaaaaagcattgagcatgttctccaagatgaatcttcaagaaataccacctttggtctatcagcttctggttctctcctccaagggaagcagaaagagtgttttggaaggaatcatagccttcttcagtgcactagataagcagcacaatgaggaacagagtggtgacgagctattggatgttgtcactgtgccatcaggtgaacttcgtcatgtggaaggcaccattattctacacattgtgtttgccatcaaattggactatgaactaggcagagaactcgtgaaacacttaaaggtaggacagcaaggagattccaataataacttaagtcccttcagcattgctcttcttctgtctgtaacaagaatacaaagatttcaggaccaggtgcttgatcttttaaagacttcggttgtaaagagctttaaggatcttcaactcctccaaggctcaaaatttcttcagaatctagttcctcatagatcttatgtttcaaccatgatcttggaagtagtgaagaatagcgttcatagctgggaccatgttactcagggcctcgtagaacttggtttcattttgatggattcatatgggccaaagaaggttcttgatggaaaaactattgaaaccagcccaagtctttctagaatgccaaaccagcatgcatgtaagctcggagctaatatcctgttggaaacttttaagatccatgagatgatcagacaagaaattttggagcaggtcctcaacagggttgttaccagagcatcttctcccatcagtcatttcttagacctgctttcaaatatcgtcatgtatgcacccttagttcttcaaagttgttcttctaaagtcacagaagcttttgactatttgtcctttctgccccttcagactgtacaaaggctgcttaaggcagtgcagccccttctcaaagtcagcatgtcaatgagagactgcttgatacttgtccttcggaaagctatgtttgccaaccagcttgatgcccgaaaatctgcagttgctgggtttttgctgctcctgaagaactttaaagttttaggcagcctgtcatcctctcagtgcagtcagtctctcagtgtcagtcaggttcatgtggatgttcacagccattacaattctgtcgccaatgaaactttttgccttgagatcatggatagtttgaggagatgcttaagccagcaagctgatgttcgactcatgctttatgaggggttttatgatgttcttcgaaggaactctcagctggctaattcagtcatgcaaactctgctctcacagttaaaacagttctatgagccaaaacctgatctgctgcctcctctgaaattagaagcttgtattctgacccaaggagataagatctctctacaagaaccactggattatctgctgtgttgtattcagcattgtttggcctggtataagaatacagtcatacccttacagcagggagaggaggaagaggaggaggaagaggcattctacgaagacctagatgatatattggagtccattactaatagaatgattaagagtgagctggaagactttgaactggataaatcagcagatttttctcagagcaccagtattggcataaaaaataatatctgtgcttttcttgtgatgggagtttgtgaggttttaatagaatacaatttctccataagtagtttcagtaagaataggtttgaggacattctgagcttatttatgtgttacaaaaaactctctgacattcttaatgaaaaagcgggtaaagccaaaactaaaatggccaacaagacaagtgatagtcttttgtccatgaaatttgtgtccagtcttctcactgctcttttcagggatagtatccaaagccaccaagaaagcctttctgttctcaggtccagcaatgagtttatgcgctatgcagtgaatgtagctctgcagaaagtacagcagctaaaggaaacagggcatgtgagtggccctgatggccaaaacccagaaaagatctttcagaacctctgtgacataactcgagtcttgctatggagatacacttcaattcctacttcagtggaagagtcgggaaagaaagagaaaggaaagagcatctcactgctgtgcttggagggtttacagaaaatattcagtgctgtgcaacagttctatcagcccaagattcagcagtttctcagagctctggatgtcacagataaggaaggagaagagagagaagatgcagatgtcagtgtcactcagagaacagcattccagatccggcaatttcagaggtccttgttgaatttacttagcagtcaagaggaagattttaatagcaaagaagccctcctgctagtcacggttcttaccagtttgtccaagttactggagccctcctctcctcagtttgtgcagatgttatcctggacatcaaagatttgcaaggaaaacagccgggaggatgccttgttttgcaagagcttgatgaacttgctcttcagcctgcatgtttcgtataagagtcctgtcattctgctgcgtgacttgtcccaggatatccacgggcatctgggagatatagaccaggatgtagaggtggagaaaacaaaccactttgcaatagtgaatttgagaacggctgcccccactgtctgtttacttgttctgagtcaggccgagaaggttctagaagaagtggactggctaatcaccaagcttaagggacaagtgagccaagaaaccttatcagaagaggcctcttctcaggcaaccctaccaaatcagcctgttgagaaagctatcatcatgcaactgggaactctgcttacatttttccacgagctggtgcagacagctctgccatcaggcagctgtgtggacaccttgttaaaggacttgtgcaaaatgtacaccacacttacagcccttgtcagatattatctccaggtgtgtcagagctccggaggaattccaaaaaatatggaaaagctggtgaagctgtctggttctcatctgacccccctgtgttattctttcatttcttacgtacagaataagagtaagagcctgaactatacgggagagaaaaaggagaaacctgctgccgttgccacagccatggccagagttcttcgggaaaccaagccaatccctaacctcatctttgccatagaacagtatgaaaaatttctcatccacctttctaagaagtccaaggtgaacctgatgcagcacatgaagctcagcacctcacgagacttcaagatcaaaggaaacatcctagacatggttcttcgagaggatggtgaagatgaaaatgaagagggcactgcatcagagcatgggggacagaacaaagaaccagccaagaagaaaaggaaaaaataaatgaaatgcctgagttaatgtgaactttggggcttctgcttcatttttacccaacaagcaacaatgccccttgtcctgtagtccacaccgatgttggcatcttggttctgaacccactgaattcaactgcaccttcagttagaaggaatcttcttggcaggtcctgctactgaaaaatggctggccttaggcaagcccttttgcaaaaagcacagctgaaagcctgagtttgggagcctgcaccaccccgatgaagctccacgggagcaaatacagagcctccaggcagtgctatggtccaggctggcttcgtttttccaaggagcctttggtgagttcaattatctggtaaatatccagcgcttcacctgaaagatagtgcaaattggttaggatgccacctcaagaactgtaactgagagctcagaagtgagcaaaggagcttaatgctaaggtcaaaaggagagtgaaaggttgagaacaattgccacgaacggtaatgttacatgttaggagggtctgttttctttttatataagtgtgtcttagatatattttaaatagaaaataagctttctgatttacttgtttggtatttaaagcacagtttgtttttctgtcacctatagagtgcaagaatgcactctatagaataaattatctttaaacatt

SEQ ID NO: 363 - DNA, 4569 bp, Homo sapiens
tcttgttgttacgggtaacggaagtgtggcggcgttgggttgagcgggctttttggaagtttgtggcggagttctgtgatatgagcaacaatggaccagaagattttatctctagcagcagaaaaaacagcagacaaactgcaagaatttcttcaaaccctgagagaaggtgatttgactaatctccttcagaatcaagcagtgaaaggaaaagttgctggagcactcctgagagccatcttcaaaggttccccctgctctgaggaagctggaacacttaggagacgtaagatatacacttgttgtatccagttggtggaatcgggggatttgcagaaagaaatagcgtctgagatcataggattactgatgctggaggctcaccattttccaggaccattattggttgaattagccaatgagtttattagtgctgtcagagaaggcagcctagtgaatggaaaatctttggagttactacctatcattctcactgccctggctacgaaaaaggaaaatctggcttatggaaaaggtgtactgagtggggaagaatgtaagaaacagttgattaacaccctgtgttctggcaggtgggatcagcaatatgtaatccaactcacctccatgttcaaggatgtccctctgactgcagaagaggtggaatttgtggtggaaaaagcattgagcatgttctccaagatgaatcttcaagaaataccacctttggtctatcagcttctggttctctcctccaagggaagcagaaagagtgttttggaaggaatcatagccttcttcagtgcactagataagcagcacaatgaggaacagagtggtgacgagctattggatgttgtcactgtgccatcaggtgaacttcgtcatgtggaaggcaccattattctacacattgtgtttgccatcaaattggactatgaactaggcagagaactcgtgaaacacttaaaggtaggacagcaaggagattccaataataacttaagtcccttcagcattgctcttcttctgtctgtaacaagaatacaaagatttcaggaccaggtgcttgatcttttaaagacttcggttgtaaagagctttaaggatcttcaactcctccaaggctcaaaatttcttcagaatctagttcctcatagatcttatgtttcaaccatgatcttggaagtagtgaagaatagcgttcatagctgggaccatgttactcagggcctcgtagaacttggtttcattttgatggattcatatgggccaaagaaggttcttgatggaaaaactattgaaaccagcccaagtctttctagaatgccaaaccagcatgcatgtaagctcggagctaatatcctgttggaaacttttaagatccatgagatgatcagacaagaaattttggagcaggtcctcaacagggttgttaccagagcatcttctcccatcagtcatttcttagacctgctttcaaatatcgtcatgtatgcacccttagttcttcaaagttgttcttctaaagtcacagaagcttttgactatttgtcctttctgccccttcagactgtacaaaggctgcttaaggcagtgcagccccttctcaaagtcagcatgtcaatgagagactgcttgatacttgtccttcggaaagctatgtttgccaaccagcttgatgcccgaaaatctgcagttgctgggtttttgctgctcctgaagaactttaaagttttaggcagcctgtcatcctctcagtgcagtcagtctctcagtgtcagtcaggttcatgtggatgttcacagccattacaattctgtcgccaatgaaactttttgccttgagatcatggatagtttgaggagatgcttaagccagcaagctgatgttcgactcatgctttatgaggggttttatgatgttcttcgaaggaactctcagctggctaattcagtcatgcaaactctgctctcacagttaaaacagttctatgagccaaaacctgatctgctgcctcctctgaaattagaagcttgtattctgacccaaggagataagatctctctacaagaaccactggattatctgctgtgttgtattcagcattgtttggcctggtataagaatacagtcatacccttacagcagggagaggaggaagaggaggaggaagaggcattctacgaagacctagatgatatattggagtccattactaatagaatgattaagagtgagctggaagactttgaactggataaatcagcagatttttctcagagcaccagtattggcataaaaaataatatctgtgcttttcttgtgatgggagtttgtgaggttttaatagaatacaatttctccataagtagtttcagtaagaataggtttgaggacattctgagcttatttatgtgttacaaaaaactctctgacattcttaatgaaaaagcgggtaaagccaaaactaaaatggccaacaagacaagtgatagtcttttgtccatgaaatttgtgtccagtcttctcactgctcttttcagagtcttgctatggagatacacttcaattcctacttcagtggaagagtcgggaaagaaagagaaaggaaagagcatctcactgctgtgcttggagggtttacagaaaatattcagtgctgtgcaacagttctatcagcccaagattcagcagtttctcagagctctggatgtcacagataaggaaggagaagagagagaagatgcagatgtcagtgtcactcagagaacagcattccagatccggcaatttcagaggtccttgttgaatttacttagcagtcaagaggaagattttaatagcaaagaagccctcctgctagtcacggttcttaccagtttgtccaagttactggagccctcctctcctcagtttgtgcagatgttatcctggacatcaaagatttgcaaggaaaacagccgggaggatgccttgttttgcaagagcttgatgaacttgctcttcagcctgcatgtttcgtataagagtcctgtcattctgctgcgtgacttgtcccaggatatccacgggcatctgggagatatagaccaggatgtagaggtggagaaaacaaaccactttgcaatagtgaatttgagaacggctgcccccactgtctgtttacttgttctgagtcaggccgagaaggttctagaagaagtggactggctaatcaccaagcttaagggacaagtgagccaagaaaccttatcagaagaggcctcttctcaggcaaccctaccaaatcagcctgttgagaaagctatcatcatgcaactgggaactctgcttacatttttccacgagctggtgcagacagctctgccatcaggcagctgtgtggacaccttgttaaaggacttgtgcaaaatgtacaccacacttacagcccttgtcagatattatctccaggtgtgtcagagctccggaggaattccaaaaaatatggaaaagctggtgaagctgtctggttctcatctgacccccctgtgttattctttcatttcttacgtacagaataagagtaagagcctgaactatacgggagagaaaaaggagaaacctgctgccgttgccacagccatggccagagttcttcgggaaaccaagccaatccctaacctcatctttgccatagaacagtatgaaaaatttctcatccacctttctaagaagtccaaggtgaacctgatgcagcacatgaagctcagcacctcacgagacttcaagatcaaaggaaacatcctagacatggttcttcgagaggatggtgaagatgaaaatgaagagggcactgcatcagagcatgggggacagaacaaagaaccagccaagaagaaaaggaaaaaataaatgaaatgcctgagttaatgtgaactttggggcttctgcttcatttttacccaacaagcaacaatgccccttgtcctgtagtccacaccgatgttggcatcttggttctgaacccactgaattcaactgcaccttcagttagaaggaatcttcttggcaggtcctgctactgaaaaatggctggccttaggcaagcccttttgcaaaaagcacagctgaaagcctgagtttgggagcctgcaccaccccgatgaagctccacgggagcaaatacagagcctccaggcagtgctatggtccaggctggcttcgtttttccaaggagcctttggtgagttcaattatctggtaaatatccagcgcttcacctgaaagatagtgcaaattggttaggatgccacctcaagaactgtaactgagagctcagaagtgagcaaaggagcttaatgctaaggtcaaaaggagagtgaaaggttgagaacaattgccacgaacggtaatgttacatgttaggagggtctgttttctttttatataagtgtgtcttagatatattttaaatagaaaataagctttctgatttacttgtttggtatttaaagcacagtttgtttttctgtcacctatagagtgcaagaatgcactctatagaataaattatctttaaacatt

SEQ ID NO: 364 - DNA, 1753 bp, Homo sapiens
agcggactgcgcatgtgcaggacccagcaggtctagagcttttctgtgtttctccggacttcgagccatggcggtgacggaagcgagcctgttgcgccagtgccccctgcttctgccccagaaccggtcgaaaaccgtgtatgagggattcatctcggctcagggaagagacttccaccttaggatagtgttgcctgaagatttacaactgaagaatgcaagattattatgtagttggcagctgagaacaatacttagtggataccatcgaatagtacaacagagaatgcagcactctcctgatctaatgagctttatgatggagttgaagatgcttttggaagttgccttaaagaatagacaagagctgtatgcactacctcctcctccccagttctactcaagccttattgaagagataggaactcttggttgggataaacttgtgtatgcggatacctgcttcagtaccatcaagttaaaagcagaagatgcttctggtagagagcatttaatcactctcaagttgaaggcaaagtatcctgcagaatcaccagattattttgtggattttcctgttccattttgtgcctcctggacacctcaggtaaattctcctcagagctccttaataagcatttatagtcagtttttggcagcaatagaatcactaaaggcattctgggatgttatggatgaaatcgatgagaagacctgggtacttgagccagaaaaacctccacggagtgcaacagcacgcagaattgcattaggtaataatgtttccataaatatagaggtagaccccaggcatcctactatgcttcctgagtgcttctttcttggagctgaccatgtggtaaaacccctgggaattaagctgagcaggaacatacatttgtgggatccagaaaatagtgtgttacaaaatttgaaagatgttttagaaattgattttccagctcgtgctatcctggaaaaatctgattttactatggattgtggaatttgttatgcttatcaacttgacggtaccattcctgatcaagtgtgtgataattctcagtgtggacaacctttccatcaaatatgcttatatgagtggctgagaggactactaactagtagacagagttttaacatcatatttggtgaatgtccatattgtagtaagccaattaccttaaaaatgtctggaaggaaacactgaaataagaatacaacatttcggtgaagagctggaaacttaaaaaattatcaaaaggaattttggtatcatcttcagagaaaaaataaagcaagaaatactaacatcaaaaggacaggtatgatgatgcgataataataaacatctgcgtttgtctcttcactaagagtaaactgggaaattgtaggccaaagtccagttgaactttctaagtctgtgatccccgtgctgactgtggaagtgtatttataccaagatggagatcttgacttcttgaatatatctggactggtaaaatcttgatgaggctcataaaatgagtttgggaattgtgtatagctgattttttgtgggaaactgtttacttcattcaaaggttcttgagactcttgatatttctgtcttctccttgtgctttcctatggaaaaaatacatatatagtttagtttgttagacgtgagttatccaagtatttattttgtgtagtgtgtaagaatgctaaataaaatgttatacaagatcaaaaaaaaaaaaaaaaaaaaaaa

SEQ ID NO: 365 - DNA, 1738 bp, Homo sapiens
agcggactgcgcatgtgcaggacccagcaggtctagagcttttctgtgtttctccggacttcgagccatggcggtgacggaagcgagcctgttgcgccagtgccccctgcttctgccccagaaccggtcgaaaaccgtgtatgagggattcatctcggctcagggaagagacttccaccttaggatagtgttgcctgaagatttacaactgaagaatgcaagattattatgtagttggcagctgagaacaatacttagtggataccatcgaatagtacaacagagaatgcagcactctcctgatctaatgagctttatgatggagttgaagatgcttttggaagttgccttaaagaatagacaagagctgtatgcactacctcctcctccccagttctactcaagccttattgaagagataggaactcttggttgggataaacttgtgtatgcggatacctgcttcagtaccatcaagttaaaagcagaagatgcttctggtagagagcatttaatcactctcaagttgaaggcaaagtatcctgcagaatcaccagattattttgtggattttcctgttccattttgtgcctcctggacacctcagagctccttaataagcatttatagtcagtttttggcagcaatagaatcactaaaggcattctgggatgttatggatgaaatcgatgagaagacctgggtacttgagccagaaaaacctccacggagtgcaacagcacgcagaattgcattaggtaataatgtttccataaatatagaggtagaccccaggcatcctactatgcttcctgagtgcttctttcttggagctgaccatgtggtaaaacccctgggaattaagctgagcaggaacatacatttgtgggatccagaaaatagtgtgttacaaaatttgaaagatgttttagaaattgattttccagctcgtgctatcctggaaaaatctgattttactatggattgtggaatttgttatgcttatcaacttgacggtaccattcctgatcaagtgtgtgataattctcagtgtggacaacctttccatcaaatatgcttatatgagtggctgagaggactactaactagtagacagagttttaacatcatatttggtgaatgtccatattgtagtaagccaattaccttaaaaatgtctggaaggaaacactgaaataagaatacaacatttcggtgaagagctggaaacttaaaaaattatcaaaaggaattttggtatcatcttcagagaaaaaataaagcaagaaatactaacatcaaaaggacaggtatgatgatgcgataataataaacatctgcgtttgtctcttcactaagagtaaactgggaaattgtaggccaaagtccagttgaactttctaagtctgtgatccccgtgctgactgtggaagtgtatttataccaagatggagatcttgacttcttgaatatatctggactggtaaaatcttgatgaggctcataaaatgagtttgggaattgtgtatagctgattttttgtgggaaactgtttacttcattcaaaggttcttgagactcttgatatttctgtcttctccttgtgctttcctatggaaaaaatacatatatagtttagtttgttagacgtgagttatccaagtatttattttgtgtagtgtgtaagaatgctaaataaaatgttatacaagatcaaaaaaaaaaaaaaaaaaaaaaa

SEQ ID NO: 366 - DNA, 7144 bp, Homo sapiens
gagttttgtgcgaaggaaaccgatggggatcggaaccgtagcggttgagctgctgctgctacggatatctgacagaagccttcggtggttgtcggcctaatgagcggacggcaaagaacgctttttcagacgtggggctcaagtatctcccgatcatctgggactccgggttgcagctccggaactgagcgacctcagagccctggcagctccaaggcgcctttgccagcagcagcggaggctcagctggagtcggacgatgatgtgttgcttgtcgcggcgtacgaggctgagcggcagttgtgtctagagaatggcgggttctgcacctccgcgggcgccctgtggatttaccctaccaattgcccagtgcgggactaccagctgcacatttcccgggctgctctgttttgcaatacgctggtgtgtctgcctaccggactgggaaagacctttattgccgccgtggtcatgtacaatttctaccgctggttcccttcaggaaaggtggtcttcatggccccaacgaaacccttggtgacacagcagatcgaggcttgctaccaggtgatgggtatcccgcaatcccacatggccgaaatgacagggtctacacaagcttccaccaggaaggaaatatggtgcagtaagagagtgctttttcttacacctcaggtcatggtaaatgacctttctagaggagcttgtcccgctgctgaaataaagtgtttagttattgatgaagctcataaagctctcggaaactatgcttattgccaggttgtaagagaactagtcaaatatacaaatcactttagaatcttggctctaagtgccacaccaggtagtgatataaaggctgtgcaacaagttattactaacctgctaattgggcagatagagcttcgttctgaagattctccagatattttgacatattctcatgaaagaaaagttgaaaagcttattgttccgcttggtgaagaacttgcagccatccaaaagacctatatccagattttggaatcatttgctcgttctttgattcagaggaatgttttgatgagaagggatatcccaaatctaacaaaatatcagataattctggcaagagatcagtttaggaaaaacccatctccgaatattgtgggaatacaacaaggcataatcgagggagagtttgctatttgtattagtttatatcatggttatgaattattgcagcaaatgggaatgagatcattatatttcttcctttgtggaattatggatggaactaaagggatgacacggtcaaaaaatgaacttggccgaaatgaagacttcatgaaactctataatcatctagagtgtatgtttgcacgtacacgtagtacttcagcaaatggtatttctgctatccaacaaggagataaaaataaaaaatttgtttatagtcatccaaagttaaagaaattagaagaagttgtaattgaacacttcaagtcatggaatgctgaaaacactactgaaaagaaacgtgatgagacccgagttatgatcttctcttcatttcgagatagtgttcaagaaattgcagaaatgctttcacagcatcagccaattattagagtaatgacttttgtcggccatgcctcagggaaaagcacgaagggttttacccagaaggagcaactggaggtagtgaaacagtttcgtgacggtggttacaacacgctggtttctacctgtgtgggtgaagaaggtttggatataggagaagttgatcttataatatgttttgattcccagaagagcccaattcgtcttgtacaacgaatgggtagaactggccgtaaacgtcaaggcaggatagttattatcctttctgaaggacgagaggaacgtatttataatcagagtcagtccaacaaaagaagtatatataaagctatttcaagtaacaggcaggtccttcatttttaccaaagaagtccacgaatggttcctgatggaatcaacccaaaattacacaaaatgttcatcacacatggtgtctatgaaccagagaagccttctcggaacttgcagcgaaagtcatctatcttttcctatagggatggaatgaggcaaagtagcctaaagaaagattggttcttatcagaagaagaatttaaattatggaacagactttatagattaagggacagtgatgaaattaaagagataacattgcctcaagttcagttttcttctttacaaaatgaggaaaacaaaccagctcaagaatcaaccactggaattcatcaactctctctctctgaatggagactgtggcaagatcatcctttgcctacacatcaagttgatcactcagatcgatgccgccattttataggccttatgcaaatgatagagggaatgagacacgaagagggagaatgcagctatgaattggaagttgaatcttatttacaaatggaagatgttacctcaacatttattgctcccaggaatgaatctaataatcttgccagtgacacctttatcactcacaagaaatcgtcatttataaagaacataaatcaaggcagttcatcctcagtgatagaatctgatgaagaatgtgctgaaattgttaaacaaactcatatcaaacctactaaaattgtttctttaaagaaaaaagtgtctaaagaaataaaaaaagatcagcttaaaaaagaaaataatcacggtattatagattctgtagataatgacagaaattccactgttgaaaatatttttcaagaagacctaccaaatgataaaaggacatcagatacagatgaaattgctgccacatgtactattaatgaaaatgttattaaagaaccgtgtgtgttattaacagagtgtcagtttacaaataaatccactagttcacttgctggaaatgttttagattctggttataacagtttcaatgatgaaaaatctgtttcatctaacttatttcttccattcgaagaagagctttatattgttagaacagatgaccaattttataattgtcactcattgacaaaagaggtactagctaatgtagagagatttttatcttattctcctccgcctctcagtggactctcagacttggaatatgaaattgctaagggtactgcacttgagaatttgcttttcttaccctgtgcagagcatttacgaagtgataaatgcacctgtttgctgtcacattcagctgtgaattctcaacagaatttagaattgaattcacttaaatgtataaattatccatctgaaaaaagttgcctttatgatatacctaatgataatatttctgatgagccaagtctctgtgactgtgatgtacataaacataatcaaaatgaaaatttagtacctaacaatcgtgttcaaatacacagaagccctgcacagaatttagttggagagaacaatcatgatgttgataacagtgacctcccagtattgtccactgatcaagatgaaagtttgctgttatttgaagatgttaatacagagttcgacgatgtgagtctttcacccttgaacagtaaaagcgaatctttacctgtgtcagacaaaactgctattagtgaaacgcctctggtctctcagttcttaatttctgatgaacttttgttggacaataattctgaactccaagatcaaatcacccgtgatgctaatagttttaaatctcgtgatcagagaggtgtacaggaagaaaaagtgaagaatcatgaggatatttttgattgctctagggatttattttctgttacctttgatttaggattctgtagtccagattctgatgatgaaatattggaacatacatcagatagcaatagacctctagatgatctatatggaaggtatttggaaattaaggagataagtgatgcaaattatgtttcgaatcaagcactaataccaagagatcatagtaaaaattttactagtggaactgttattatcccatcaaatgaagatatgcagaatccaaattatgtacatttgccactgagtgcagcaaaaaatgaagaattgttatctcctggttattctcagttttctttaccagtgcaaaaaaaagttatgagtacaccactctctaaatcaaacacattgaactcattttctaagataagaaaggaaatacttaagacaccagattctagtaaggaaaaagtaaacctacaaagattcaaagaagcattgaattcaacttttgattattcagaattttctctagaaaagtctaaaagcagtggtccaatgtatctgcataaatcctgtcattctgttgaagatggacaattattaacaagtaacgaaagtgaagatgacgagattttccgaagaaaagttaaaagagcaaaaggaaatgttttaaactctcctgaggatcagaaaaatagtgaagttgattctccacttcatgctgtcaaaaagcgcagatttcctataaacagatcagaattatcatctagtgatgagagtgagaattttcccaaaccatgttcacaattagaagacttcaaggtttgtaacgggaatgccagaagaggcatcaaagtcccaaagagacagagtcacttaaagcatgtagctaggaagtttttagatgatgaagcagaactttctgaagaagatgcagaatatgtttcatcagatgaaaatgatgagtcagaaaatgaacaagattcctcattacttgactttttaaatgatgaaactcaactttcacaggctataaatgattctgaaatgagagctatttacatgaaatctttgcgtagtccaatgatgaacaataagtacaaaatgattcataagacacataaaaacataaacattttctcgcagattcctgaacaagatgaaacctatttagaggatagtttttgtgttgatgaagaggagtcttgcaaaggccaatcaagtgaagaagaagtttgtgttgattttaacttaataactgatgattgctttgcaaatagtaaaaagtataaaactcgacgtgcagtaatgctaaaagaaatgatggaacaaaattgtgcacattcaaaaaagaaattatccagaattattttaccagatgattcaagtgaggaggagaacaatgtaaatgataaaagagaatctaatattgcggttaacccaagcactgttaagaagaacaaacaacaggaccattgtttaaattcagtgccttctggatcttctgcgcagtccaaggtgcgttctactccaagagttaatccattagcaaagcagagcaaacagacatcgctgaatttaaaggatacaatttccgaagtctcagacttcaaacctcagaatcataatgaagtccagtctaccacaccacccttcactactgttgattcacagaaagactgtagaaaatttccagttccacagaaggatggtagtgctttggaggattctagcacttcaggggcatcctgttccaagtcaagaccacatttagctgggacacatacttctcttagacttccgcaggaaggaaaaggaacctgtattcttgtaggtggtcatgaaatcacttctggattagaagtaatttcttccctaagagcaattcatgggttgcaagtagaagtttgtcctcttaatggctgtgattacatcgtgagtaatcgcatggtggtggaaaggaggtctcaatctgagatgttaaatagtgtcaataagaacaagttcattgagcagatccagcacctgcagagtatgtttgaaagaatatgtgtgattgtggaaaaggacagagaaaaaacaggagacacatcaaggatgtttaggagaacaaagagctatgacagcctgctgactaccttaattggcgctggaatccgaattcttttcagttcctgccaagaagaaaccgcagatttgctaaaggaactgtctttagtggaacaaagaaagaatgttggtattcatgttccaacagtggtgaatagtaataaaagtgaggcactccagttttatttaagtattcccaatataagttatataactgcattaaatatgtgtcaccagttttcatctgtgaaaaggatggctaacagctcacttcaagaaatctccatgtatgcacaagtaactcatcagaaggctgaggagatctatagatatattcactatgtatttgacatacaaatgttaccaaatgatcttaaccaagatagactgaaatctgatatataatcaagctgctcaagatggggttttcaaagacctctcacaatattaaatgcacttcaataatcattgctgttttatgtttatttgtaaataagagaatattttatttaaatattttatattgtatacatttttatttatagattatagaaattattaaaaaagaaaaatctgatgttcagtgatcattttgactagattataaaactaatttttcttattaaataaaacaaggtttattaaaagtgttactaaggatagtttaagaaagtaaaagctaagctagagatatactttggaatgtttcccaaaattaaagttgtactgttgtgataaatagtaaagttgacatgtctatgactacagccaacttgtcgattttccctatgtgtagatagtatacttttaagtgtactgattctaaatacatgtacttggtaaggtgtgggtgatgggtgggttgtgagataaatgacccagtaactaggaaagtagaaaacttaactgaatgtttatctgaccaaaggtgtgtcccagttaagtactgtcaaatctattaatatgaactctgatatggtttggctgtgtccccaaccaaaatctcatcttgacttgtaatctgaattataatcccaatatattggggagggacctcctggaacgtgattagctcatgggggcggttcccccatgctgttctagtgatagttctcagaggatctgatggttttataagcttttcctctgttcactctgcagttctcttgcctactgccatgtggaaaaggaaacgtttgcttcccctccaccatgattgtaagttcccgaggcctccccagccatgcaggactgtgagtcaattaaacatcttttccttataaattaaaaaaaaaaaaaaaaa

SEQ ID NO: 367 - DNA, 3723 bp, Homo sapiens
gagtcacgcgcctgggtgtcggcggggctgcgggaccgcgagtgagtgtggtcgctcctggttctgccagctcccctgagagcctgaacccgggcttgagagcctcgccaccccgggtgacatccctgccgtgggcttgggggctctgggtgtgattccgccggtccgggtcccgcagcgaccacctacccagcgcagtcaggggcggggctgggacccagagcgggaccccggctgccgagtccaggtgtcccgcgggcctcgatttggggagcagaaaacgccaggtcttcaagggtgtctgccaccaccatgcctgacccatttggcagcagcctcgtgtgtggtggtctggtgtggacggtggaagcgtgattctgctgagtgtcagtgtgaccactcgtgctcagccgtatctcagcaggaggacaggtgccggagcagctcgtgcagctaagcagccaactgcagaaacgtcaggcctgttgcagtctccaaggcaccatgaatgccatcgtggctctctgccacttctgcgagctccacggcccccgcactctcttctgcacggaggtgctgcacgccccacttcctcaaggggatgggaatgaggacagtcctggccagggtgagcaggcggaagaagaggaaggtggcattcagatgaacagtcggatgcgtgcgcacagccccgcagagggggccagcgtcgagtccagcagcccggggcccaaaaagtcggacatgtgcgagggctgccggtcacttgctgcagggcacccgggatatatcagccatgataaagagacctccattaaatacgtcagccaccagcaccccagccacccccagctcttcagcattgtccgccaggcctgtgtccggagcctgagctgtgaggtctgccctggccgtgaaggccccatcttcttcggagatgagcagcacggctttgtgttcagccacaccttcttcatcaaggacagcctggccaggggcttccagcgctggtacagcatcatcaccatcatgatggaccggatctacctcatcaactcctggcccttcctgctggggaaggtccggggaatcatcgatgagctccagggcaaggcgctcaaggtgtttgaggcagagcagtttggatgcccacagcgtgctcagaggatgaacacagccttcacgccattcctacaccagaggaacggcaacgccgcccgctcgctgacatcgctgacaagtgatgacaacctgtgggcgtgcctgcacacctcctttgcctggctcctgaaggcgtgtggcagccggctgaccgagaagctcctggaaggtgctccgaccgaggataccttggtccagatggagaagctcgctgatttagaagaggaatcagaaagctgggacaactctgaggctgaagaggaggagaaagcccctgtgttgccagagagtacagaagggcgggagctgacccagggcccggcagagtcctcctctctctcaggctgtgggagctggcagccccggaagctgccagtcttcaagtccctccggcacatgaggcaggtcctgggtgccccttctttccgcatgctggcctggcacgttctcatggggaaccaggtgatctggaaaagcagagacgtggacctcgtccagtcagcttttgaagtacttcggaccatgcttcccgtgggctgcgtccgcatcatcccatacagcagccagtacgaggaggcctatcggtgcaacttcctggggctcagcccgcacgtgcagatccccccccacgtgctctcctcagagtttgctgtcatcgtggaggtccacgcagccgcacgttccaccctccaccctgtggggtgtgaggatgaccagtctctcagcaagtacgagtttgtggtgaccagtgggagccctgtagctgcagaccgagtgggccccaccatcctgaataagattgaagcggctctgaccaaccagaacctgtctgtggatgtggtggaccagtgcctcgtctgcctcaaggaggagtggatgaacaaagtgaaggtgctttttaagttcaccaaggtggacagtcgacccaaagaggacacacagaagctgctgagcatcctgggtgcgtccgaggaggacaatgtcaagctgctgaagttctggatgactggcctgagcaagacctacaagtcacacctcatgtccacggtccgcagccccacagcctcggagtctcggaactgacccgtcacacacacctgcctaaagacagggatggctgtccacaggatcctccagccccgtgagagggactgtcccttgagtttctcaactgctggaaggagctgtgtcccagcaaggaagggaaaccatcagggctgggctcggccctgtcaggtttggggcctgtgtgcttcccagactctccctccagccgttggaatcgctgaagatggcaatgaaaggcggagggatgatgggctctctctgtgttcaaactccttggagagacgactaggaggacagcttgcctcccaggccccttgtggacttagactcaaaacccgcaggagaaacaggtccgactcagtatgcagtcgcaataacatgtctgctcccgaggttaacattcaagcgtttctactttgaaattcagcaagagtttctgggccttatgtttgagggtaccttttgctgcagttgtgaatattcagtacattgccagctcttggtcactgagtgattgagttagggctccgcaagagactttggggagtgaagtggatctcttcctcatcttttggtcctctgaaatgtgtgttctgaagccatggggctcgtcttctggggtgttcccctgcaggtgctggtgaaggtaacctggggcttaatgatggagtccctgatcatttttgcacaagacaggttgctgaggggtcggcaagcatctgacttgcccaatcccctggatatggtgagccccgccatgcttttattctgtatcgcttttgtctttattgctgctttcaacatttacgtttggttacagttaactattttcggagtgtggtgattgaagacaatttcatcatcccactgtacttttttttttgagagggagtttcactcttgttgcccaggctggagtgcaatggcacgatcttggctcactgcaacctctgcctcctgggttcaagcaattctcctgcctcagcctccagagtagctggaactacaggtgcccgccactatgcccagctaatttttgtattttttagtagagacggggtttcaccgtgttggccgggctggtctcaaactcctgacctcaggtgatccacccacctcagcctcccaaagtgctgggattacaagcgtgagccactgtgcctggcccttttttttttttttttttttttttttaaagagatggcatcttgctatgtcgtccaggctggtcttgaactcctgagttcaagcagtcctcctgcttcaacatacagctacaggtaccccccactatacatttttaataaggattcatggctcagagggattttctgatggttttgctgatttgtttctagtttttttgtgtttatatttaacatgaagaccaagtttatataactaggtatctgtataatgcaacaacattggaacacaataaagatgtatttttgtaaaaaaaaaaaaaaaaaaaaaaaaaaaaaaaaaaaaaaa

SEQ ID NO: 368 - DNA, 1760 bp, Homo sapiens
gagtcacgcgcctgggtgtcggcggggctgcgggaccgcgagtgagtgtggtcgctcctggttctgccagctcccctgagagcctgaacccgggcttgagagcctcgccaccccgggtgacatccctgccgtgggcttgggggctctgggtgtgattccgccggtccgggtcccgcagcgaccacctacccagcgcagtcaggggcggggctgggacccagagcgggaccccggctgccgagtccaggtgtcccgcgggcctcgatttggggagcagaaaacgccaggtcttcaagggtgtctgccaccaccatgcctgacccatttggcagcagcctcgtgtgtggtggtctggtgtggacggtggaagcgtgattctgctgagtgtcagtgtgaccactcgtgctcagccgtatctcagcaggaggacaggtgccggagcagctcgtgcagctaagcagccaactgcagaaacgtcaggcctgttgcagtctccaaggcaccatgaatgccatcgtggctctctgccacttctgcgagctccacggcccccgcactctcttctgcacggaggtgctgcacgccccacttcctcaaggggatgggaatgaggacagtcctggccagggtgagcaggcggaagaagaggaaggtggcattcagatgaacagtcggatgcgtgcgcacagccccgcagagggggccagcgtcgagtccagcagcccggggcccaaaaagtcggacatgtgcgagggctgccggtcacttgctgcagggcacccgggatatatcagccatgataaagagacctccattaaatacgtcagccaccagcaccccagccacccccagctcttcagcattgtccgccaggcctgtgtccggagcctgagctgtgaggtctgccctggccgtgaaggccccatcttcttcggagatgagcagcacggctttgtgttcagccacaccttcttcatcaaggacagcctggccaggggcttccagcgctggtacagcatcatcaccatcatgatggaccggatctacctcatcaactcctggcccttcctgctggggaaggtccggggaatcatcgatgagctccagggcaaggcgctcaaggtgtttgaggcagagcagtttggatgcccacagcgtgctcagaggatgaacacagccttcacgccattcctacaccagaggaacggcaacgccgcccgctcgctgacatcgctgacaagtgatgacaacctgtgggcgtgcctgcacacctcctttgcctggctcctgaaggcgtgtggcagccggctgaccgagaagctcctggaaggtgctccgaccgaggataccttggtccagatggagaagctcgctggtgaggcaggggtgctgttgccggggccttggcccggatggccgtggggcggtaccagctgtctgctctcctggcaggaatcgctgagggagggaaacgcggctctgaatcagcccagaacgagccttcgggaagctcaccctccgatctcggtgtgattgttgtgattgttgtgatttcctgtctcgtttgccttgaccgccatgtgaaagaatctgttccccagctaggtggggaaaattcacaggtgggctgtctgtagagagaactggctgattaaaggcttctcgtcccgattttgtgatagccaagtgcttggcctggtcgacggtctttgctcctttacaaataaagtgttctgtttcaaaaaaaaaaaaaaaaaaaa

SEQ ID NO: 369 - DNA, 3047 bp, Homo sapiens
tcttgcgtcaagacggccgtgctgagcgaatgcaggcgacttgcgagctgggagcgatttaaaacgctttggattcccccggcctgggtggggagagcgagctgggtgccccctagattccccgcccccgcacctcatgagccgaccctcggctccatggagcccggcaattatgccaccttggatggagccaaggatatcgaaggcttgctgggagcgggaggggggcggaatctggtcgcccactcccctctgaccagccacccagcggcgcctacgctgatgcctgctgtcaactatgcccccttggatctgccaggctcggcggagccgccaaagcaatgccacccatgccctggggtgccccaggggacgtccccagctcccgtgccttatggttactttggaggcgggtactactcctgccgagtgtcccggagctcgctgaaaccctgtgcccaggcagccaccctggccgcgtaccccgcggagactcccacggccggggaagagtaccccagccgccccactgagtttgccttctatccgggatatccgggaacctaccagcctatggccagttacctggacgtgtctgtggtgcagactctgggtgctcctggagaaccgcgacatgactccctgttgcctgtggacagttaccagtcttgggctctcgctggtggctggaacagccagatgtgttgccagggagaacagaacccaccaggtcccttttggaaggcagcatttgcagactccagcgggcagcaccctcctgacgcctgcgcctttcgtcgcggccgcaagaaacgcattccgtacagcaaggggcagttgcgggagctggagcgggagtatgcggctaacaagttcatcaccaaggacaagaggcgcaagatctcggcagccaccagcctctcggagcgccagattaccatctggtttcagaaccgccgggtcaaagagaagaaggttctcgccaaggtgaagaacagcgctaccccttaagagatctccttgcctgggtgggaggagcgaaagtgggggtgtcctggggagaccaggaacctgccaagcccaggctggggccaaggactctgctgagaggcccctagagacaacacccttcccaggccactggctgctggactgttcctcaggagcggcctgggtacccagtatgtgcagggagacggaaccccatgtgacagcccactccaccagggttcccaaagaacctggcccagtcataatcattcatcctgacagtggcaataatcacgataaccagtactagctgccatgatcgttagcctcatattttctatctagagctctgtagagcactttagaaaccgctttcatgaattgagctaattatgaataaatttggaaggcgatccctttgcagggaagctttctctcagacccccttccattacacctctcaccctggtaacagcaggaagactgaggagaggggaacgggcagattcgttgtgtggctgtgatgtccgtttagcatttttctcagctgacagctgggtaggtggacaattgtagaggctgtctcttcctccctccttgtccaccccatagggtgtacccactggtcttggaagcacccatccttaatacgatgatttttctgtcgtgtgaaaatgaagccagcaggctgcccctagtcagtccttccttccagagaaaaagagatttgagaaagtgcctgggtaattcaccattaatttcctcccccaaactctctgagtcttcccttaatatttctggtggttctgaccaaagcaggtcatggtttgttgagcatttgggatcccagtgaagtagatgtttgtagccttgcatacttagcccttcccaggcacaaacggagtggcagagtggtgccaaccctgttttcccagtccacgtagacagattcacagtgcggaattctggaagctggagacagacgggctctttgcagagccgggactctgagagggacatgagggcctctgcctctgtgttcattctctgatgtcctgtacctgggctcagtgcccggtgggactcatctcctggccgcgcagcaaagccagcgggttcgtgctggtccttcctgcaccttaggctgggggtggggggcctgccggcgcattctccacgattgagcgcacaggcctgaagtctggacaacccgcagaaccgaagctccgagcagcgggtcggtggcgagtagtggggtcggtggcgagcagttggtggtgggccgcggccgccactacctcgaggacatttccctcccggagccagctctcctagaaaccccgcggcggccgccgcagccaagtgtttatggcccgcggtcgggtgggatcctagccctgtctcctctcctgggaaggagtgagggtgggacgtgacttagacacctacaaatctatttaccaaagaggagcccgggactgagggaaaaggccaaagagtgtgagtgcatgcggactgggggttcaggggaagaggacgaggaggaggaagatgaggtcgatttcctgatttaaaaaatcgtccaagccccgtggtccagcttaaggtcctcggttacatgcgccgctcagagcaggtcactttctgccttccacgtcctccttcaaggaagccccatgtgggtagctttcaatatcgcaggttcttactcctctgcctctataagctcaaacccaccaacgatcgggcaagtaaaccccctccctcgccgacttcggaactggcgagagttcagcgcagatgggcctgtggggagggggcaagatagatgagggggagcggcatggtgcggggtgaccccttggagagaggaaaaaggccacaagaggggctgccaccgccactaacggagatggccctggtagagacctttgggggtctggaacctctggactccccatgctctaactcccacactctgctatcagaaacttaaacttgaggattttctctgtttttcactcgcaataaattcagagcaaacaaaaaaaaaaaaa

SEQ ID NO: 370 - DNA, 1500 bp, Homo sapiens
ttgctgtccctgagtctcatctctccctctccccgtccctccctcaagtcctgtgggtctccgtccctccgtatgtctttacttaaagggaaatccagacccttccacaggccactctagaggctccatttccccttcaggtccggaagtggagtgtcctgggttccatccagatcgcatgtcttctacgtctacgttcgtgtctcccgcctcttccctcagcctcacccgaatcagggcctccagagcattctgggcagtagcgagtccctgggtaaggggcgtccagggcacctccctggggcccggagcagctcattccaggacatctgggacaggaagggtaccgggaatgaactggggtgctagtacccaggacccaaagccaggggctgccagaaatacctattaacccccatttcccagcctcctcttacacaggcgcattcccgggttctcctctgaggccgggagcggcctcccagccccacccccgactccccttcccccccaggagatggacactttatagagagagctttttattctctcgttaaacctgtcaaagcgcaggagacagaaagctagggagggagaggaggagaaggaggtggggcccggctcctcgtcccctcttcctccgcccaccacgcctcccctccccccggacgtgtaaatgagactctgcaaactggaaagcagcgaaaggacacctccttccttttctctcttgttgtttttaagtggaatgagagagagaggagtggagagggaaaagaagagagagagggagaagagagagaggagagaaagagcgagagagcgagagagagagacagagacagagagagagagagagagagagagagagagaaagagagagagagagagagagaataagctggggtaaagtattttcgcagtttctgcctttaggattttattagcttctctcccccaggccgcagccaatcagcgcgcgtgcccgggcccctgcgtctcttgcgtcaagacggccgtgctgagcgaatgcaggcgacttgcgagctgggagcgatttaaaacgctttggattcccccggcctgggtggggagagcgagctgggtgccccctagattccccgcccccgcacctcatgagccgaccctcggctccatggagcccggcaattatgccaccttggatggagccaaggatatcgaaggcttgctgggagcgggaggggggcggaatctggtcgcccactcccctctgaccagccacccagcggcgcctacgctgatgcctgctgtcaactatgcccccttggatctgccaggctcggcggagccgccaaagcaatgccacccatgccctggggtgccccaggggacgtccccagctcccgtgccttatggttactttggaggcgggtactactcctgccgagtgtcccggagctcgctgaaaccctgtgcccaggcagccaccctggccgcgtaccccgcggagactcccac

SEQ ID NO: 371 - DNA, 1757 bp, Homo sapiens
cccttcccccccaggagatggacactttatagagagagctttttattctctcgttaaacctgtcaaagcgcaggagacagaaagctagggagggagaggaggagaaggaggtggggcccggctcctcgtcccctcttcctccgcccaccacgcctcccctccccccggacgtgtaaatgagactctgcaaactggaaagcagcgaaaggacacctccttccttttctctcttgttgtttttaagtggaatgagagagagaggagtggagagggaaaagaagagagagagggagaagagagagaggagagaaagagcgagagagcgagagagagagacagagacagagagagagagagagagagagagagagagaaagagagagagagagagagagaataagctggggtaaagtattttcgcagtttctgcctttaggattttattagcttctctcccccaggccgcagccaatcagcgcgcgtgcccgggcccctgcgtctcttgcgtcaagacggccgtgctgagcgaatgcaggcgacttgcgagctgggagcgatttaaaacgctttggattcccccggcctgggtggggagagcgagctgggtgccccctagattccccgcccccgcacctcatgagccgaccctcggctccatggagcccggcaattatgccaccttggatggagccaaggatatcgaaggcttgctgggagcgggaggggggcggaatctggtcgcccactcccctctgaccagccacccagcggcgcctacgctgatgcctgctgtcaactatgcccccttggatctgccaggctcggcggagccgccaaagcaatgccacccatgccctggggtgccccaggggacgtccccagctcccgtgccttatggttactttggaggcgggtactactcctgccgagtgtcccggagctcgctgaaaccctgtgcccaggcagccaccctggccgcgtaccccgcggagactcccacggccggggaagagtaccccagccgccccactgagtttgccttctatccgggatatccgggaacctaccagcctatggccagttacctggacgtgtctgtggtgcagactctgggtgctcctggagaaccgcgacatgactccctgttgcctgtggacagttaccagtcttgggctctcgctggtggctggaacagccagatgtgttgccagggagaacagaacccaccaggtcccttttggaaggcagcatttgcaggtacctctattaccctgggtccccttgtctctgagcctggggttgtgggtcccaatggcatttccctgggaggaggaggagggagacttggagctggtgaggatgagcttggtgctcctcccttggttattaggactctgaaggaggtctgagtagctggagggcctggatggaggtcagtgtgaggggcctgagctgggtgctatctgaagcctgaaggccacctcacttctccaggaggccctgggaccagcctttcaacatgtctgagaggtttagatctctttgctgttgagtggggatcagggtgtccctacccagcacaattccaaactaattctacacaaaagctaaataactctcaattcggtgcgtggggagtgggtgtgggagatgggtaaaaaggtattggatgtactgtagagaatacaacctctcactttctattagatgagttttccaatttccaaagaaaaatttaggtttcctgcagccgtgac

SEQ ID NO: 372 - DNA, 3279 bp, Homo sapiens
gatgagttttccaatttccaaagaaaaatttaggtttcctgcagccgtgacatatgtgtgtgcactgggatgggttaatgtgtgtgtgtgtgtgtgtatgcgcatgtattgggagtgggggcagaaacgtgtttccagaatttgcctgtagaatctaaaagagtggccaagagtctggaaatgcatgaagactggacgtatgtgatggtgggcaaaggcctgactgtgtgtggtgtgtgggtatgtttgcagattcgcgggtgtgagagcagtgatgggtgagggtggccttcaggagccaaggctgagcggtggtgagagaacaagccggaagccagggtgctgtcctggtatgctttggaggaacaggattgcacgtgcgcctgtagggtgacctgtgtgcacctgtgagatgacttagcttggggcttgcaaggcctgggtctgcatgggtgggtatctgaccatgccttttcctccctccctttcacgccgcgcagactccagcgggcagcaccctcctgacgcctgcgcctttcgtcgcggccgcaagaaacgcattccgtacagcaaggggcagttgcgggagctggagcgggagtatgcggctaacaagttcatcaccaaggacaagaggcgcaagatctcggcagccaccagcctctcggagcgccagattaccatctggtttcagaaccgccgggtcaaagagaagaaggttctcgccaaggtgaagaacagcgctaccccttaagagatctccttgcctgggtgggaggagcgaaagtgggggtgtcctggggagaccaggaacctgccaagcccaggctggggccaaggactctgctgagaggcccctagagacaacacccttcccaggccactggctgctggactgttcctcaggagcggcctgggtacccagtatgtgcagggagacggaaccccatgtgacagcccactccaccagggttcccaaagaacctggcccagtcataatcattcatcctgacagtggcaataatcacgataaccagtactagctgccatgatcgttagcctcatattttctatctagagctctgtagagcactttagaaaccgctttcatgaattgagctaattatgaataaatttggaaggcgatccctttgcagggaagctttctctcagacccccttccattacacctctcaccctggtaacagcaggaagactgaggagaggggaacgggcagattcgttgtgtggctgtgatgtccgtttagcatttttctcagctgacagctgggtaggtggacaattgtagaggctgtctcttcctccctccttgtccaccccatagggtgtacccactggtcttggaagcacccatccttaatacgatgatttttctgtcgtgtgaaaatgaagccagcaggctgcccctagtcagtccttccttccagagaaaaagagatttgagaaagtgcctgggtaattcaccattaatttcctcccccaaactctctgagtcttcccttaatatttctggtggttctgaccaaagcaggtcatggtttgttgagcatttgggatcccagtgaagtagatgtttgtagccttgcatacttagcccttcccaggcacaaacggagtggcagagtggtgccaaccctgttttcccagtccacgtagacagattcacagtgcggaattctggaagctggagacagacgggctctttgcagagccgggactctgagagggacatgagggcctctgcctctgtgttcattctctgatgtcctgtacctgggctcagtgcccggtgggactcatctcctggccgcgcagcaaagccagcgggttcgtgctggtccttcctgcaccttaggctgggggtggggggcctgccggcgcattctccacgattgagcgcacaggcctgaagtctggacaacccgcagaaccgaagctccgagcagcgggtcggtggcgagtagtggggtcggtggcgagcagttggtggtgggccgcggccgccactacctcgaggacatttccctcccggagccagctctcctagaaaccccgcggcggccgccgcagccaagtgtttatggcccgcggtcgggtgggatcctagccctgtctcctctcctgggaaggagtgagggtgggacgtgacttagacacctacaaatctatttaccaaagaggagcccgggactgagggaaaaggccaaagagtgtgagtgcatgcggactgggggttcaggggaagaggacgaggaggaggaagatgaggtcgatttcctgatttaaaaaatcgtccaagccccgtggtccagcttaaggtcctcggttacatgcgccgctcagagcaggtcactttctgccttccacgtcctccttcaaggaagccccatgtgggtagctttcaatatcgcaggttcttactcctctgcctctataagctcaaacccaccaacgatcgggcaagtaaaccccctccctcgccgacttcggaactggcgagagttcagcgcagatgggcctgtggggagggggcaagatagatgagggggagcggcatggtgcggggtgaccccttggagagaggaaaaaggccacaagaggggctgccaccgccactaacggagatggccctggtagagacctttgggggtctggaacctctggactccccatgctctaactcccacactctgctatcagaaacttaaacttgaggattttctctgtttttcactcgcaataaattcagagcaaacaaaagatgtggaatcttagagatttattccactggtgtgttaggaccattaaaaagacgtgggcgcccccttccgacagaggctcaccactccaggagaacctgcgggcaggctttcatcgtccgcggagctacaggcttccagcggcctggggcctcgtgggtactgagctgcgtgtgggggtccaggacccgatgtcgcctgccattcggccagggcatcggcagatgtattggtccagcccccgagagacccaggaagaaggcaaggaggttcggtacgagccatctcgaatggaagaagaaggcggtcggtctgcgggagccaggccgcagagccatccgccttctgtccatgtcttctttatcttcctcgccataataattagtggtgtggacccccccacacacactttttttcggatttacttgtatggaacctgtgcaaaaaatatttaatttcgttttgtattaaacgctttcattgggaatcccttcccaat

SEQ ID NO: 373 - DNA, 1500 bp, Homo sapiens
ggaagatgaggtcgatttcctgatttaaaaaatcgtccaagccccgtggtccagcttaaggtcctcggttacatgcgccgctcagagcaggtcactttctgccttccacgtcctccttcaaggaagccccatgtgggtagctttcaatatcgcaggttcttactcctctgcctctataagctcaaacccaccaacgatcgggcaagtaaaccccctccctcgccgacttcggaactggcgagagttcagcgcagatgggcctgtggggagggggcaagatagatgagggggagcggcatggtgcggggtgaccccttggagagaggaaaaaggccacaagaggggctgccaccgccactaacggagatggccctggtagagacctttgggggtctggaacctctggactccccatgctctaactcccacactctgctatcagaaacttaaacttgaggattttctctgtttttcactcgcaataaattcagagcaaacaaaagatgtggaatcttagagatttattccactggtgtgttaggaccattaaaaagacgtgggcgcccccttccgacagaggctcaccactccaggagaacctgcgggcaggctttcatcgtccgcggagctacaggcttccagcggcctggggcctcgtgggtactgagctgcgtgtgggggtccaggacccgatgtcgcctgccattcggccagggcatcggcagatgtattggtccagcccccgagagacccaggaagaaggcaaggaggttcggtacgagccatctcgaatggaagaagaaggcggtcggtctgcgggagccaggccgcagagccatccgccttctgtccatgtcttctttatcttcctcgccataataattagtggtgtggacccccccacacacactttttttcggatttacttgtatggaacctgtgcaaaaaatatttaatttcgttttgtattaaacgctttcattgggaatcccttcccaattttagtctcccacctatccctggacgaccacattgaaatctctcacttatttgtgtttaaatcacaacaaaatctacaaacctatattcgcctgcagatatttatttttacataagggctatgttaagctacaggaggaaatgttttgcttaccattcggacaaacgtgtgaacacaatgtcacaataggtgaatccagacaatgagctcacagacgaataaacgcagaggcacacacatatactccggaaaataagcagggcgccttttcactaacaaggcgcaattgtaccctgagctgccctccagaccgttcccctccctcagagccaaactcccgcagcgaatctctcagcaagctacgaaatgggatcacagggtcgcgtctacgcgggctccaggcccgaaataatttctaactccaaagcaagtggattttattaggcctccagaagccgaataagggagtagtggcgcaatgcgtagaaactacctccgga

SEQ ID NO: 374 - DNA, 5436 bp, Homo sapiens
ggccgcggcggcggaggcagcagcggcggcggcagtggcggcggcgaaggtggcggcggctcggccagtactcccggcccccgccatttcggactgggagcgagcgcggcgcaggcactgaaggcggcggcggggccagaggctcagcggctcccaggtgcgggagagaggcctgctgaaaatgactgaatataaacttgtggtagttggagctggtggcgtaggcaagagtgccttgacgatacagctaattcagaatcattttgtggacgaatatgatccaacaatagaggattcctacaggaagcaagtagtaattgatggagaaacctgtctcttggatattctcgacacagcaggtcaagaggagtacagtgcaatgagggaccagtacatgaggactggggagggctttctttgtgtatttgccataaataatactaaatcatttgaagatattcaccattatagagaacaaattaaaagagttaaggactctgaagatgtacctatggtcctagtaggaaataaatgtgatttgccttctagaacagtagacacaaaacaggctcaggacttagcaagaagttatggaattccttttattgaaacatcagcaaagacaagacagagagtggaggatgctttttatacattggtgagggagatccgacaatacagattgaaaaaaatcagcaaagaagaaaagactcctggctgtgtgaaaattaaaaaatgcattataatgtaatctgggtgttgatgatgccttctatacattagttcgagaaattcgaaaacataaagaaaagatgagcaaagatggtaaaaagaagaaaaagaagtcaaagacaaagtgtgtaattatgtaaatacaatttgtacttttttcttaaggcatactagtacaagtggtaatttttgtacattacactaaattattagcatttgttttagcattacctaatttttttcctgctccatgcagactgttagcttttaccttaaatgcttattttaaaatgacagtggaagtttttttttcctctaagtgccagtattcccagagttttggtttttgaactagcaatgcctgtgaaaaagaaactgaatacctaagatttctgtcttggggtttttggtgcatgcagttgattacttcttatttttcttaccaattgtgaatgttggtgtgaaacaaattaatgaagcttttgaatcatccctattctgtgttttatctagtcacataaatggattaattactaatttcagttgagaccttctaattggtttttactgaaacattgagggaacacaaatttatgggcttcctgatgatgattcttctaggcatcatgtcctatagtttgtcatccctgatgaatgtaaagttacactgttcacaaaggttttgtctcctttccactgctattagtcatggtcactctccccaaaatattatattttttctataaaaagaaaaaaatggaaaaaaattacaaggcaatggaaactattataaggccatttccttttcacattagataaattactataaagactcctaatagcttttcctgttaaggcagacccagtatgaaatggggattattatagcaaccattttggggctatatttacatgctactaaatttttataataattgaaaagattttaacaagtataaaaaattctcataggaattaaatgtagtctccctgtgtcagactgctctttcatagtataactttaaatcttttcttcaacttgagtctttgaagatagttttaattctgcttgtgacattaaaagattatttgggccagttatagcttattaggtgttgaagagaccaaggttgcaaggccaggccctgtgtgaacctttgagctttcatagagagtttcacagcatggactgtgtccccacggtcatccagtgttgtcatgcattggttagtcaaaatggggagggactagggcagtttggatagctcaacaagatacaatctcactctgtggtggtcctgctgacaaatcaagagcattgcttttgtttcttaagaaaacaaactcttttttaaaaattacttttaaatattaactcaaaagttgagattttggggtggtggtgtgccaagacattaattttttttttaaacaatgaagtgaaaaagttttacaatctctaggtttggctagttctcttaacactggttaaattaacattgcataaacacttttcaagtctgatccatatttaataatgctttaaaataaaaataaaaacaatccttttgataaatttaaaatgttacttattttaaaataaatgaagtgagatggcatggtgaggtgaaagtatcactggactaggaagaaggtgacttaggttctagataggtgtcttttaggactctgattttgaggacatcacttactatccatttcttcatgttaaaagaagtcatctcaaactcttagttttttttttttacaactatgtaatttatattccatttacataaggatacacttatttgtcaagctcagcacaatctgtaaatttttaacctatgttacaccatcttcagtgccagtcttgggcaaaattgtgcaagaggtgaagtttatatttgaatatccattctcgttttaggactcttcttccatattagtgtcatcttgcctccctaccttccacatgccccatgacttgatgcagttttaatacttgtaattcccctaaccataagatttactgctgctgtggatatctccatgaagttttcccactgagtcacatcagaaatgccctacatcttatttcctcagggctcaagagaatctgacagataccataaagggatttgacctaatcactaattttcaggtggtggctgatgctttgaacatctctttgctgcccaatccattagcgacagtaggatttttcaaacctggtatgaatagacagaaccctatccagtggaaggagaatttaataaagatagtgctgaaagaattccttaggtaatctataactaggactactcctggtaacagtaatacattccattgttttagtaaccagaaatcttcatgcaatgaaaaatactttaattcatgaagcttactttttttttttggtgtcagagtctcgctcttgtcacccaggctggaatgcagtggcgccatctcagctcactgcaacctccatctcccaggttcaagcgattctcgtgcctcggcctcctgagtagctgggattacaggcgtgtgccactacactcaactaatttttgtatttttaggagagacggggtttcaccctgttggccaggctggtctcgaactcctgacctcaagtgattcacccaccttggcctcataaacctgttttgcagaactcatttattcagcaaatatttattgagtgcctaccagatgccagtcaccgcacaaggcactgggtatatggtatccccaaacaagagacataatcccggtccttaggtagtgctagtgtggtctgtaatatcttactaaggcctttggtatacgacccagagataacacgatgcgtattttagttttgcaaagaaggggtttggtctctgtgccagctctataattgttttgctacgattccactgaaactcttcgatcaagctactttatgtaaatcacttcattgttttaaaggaataaacttgattatattgtttttttatttggcataactgtgattcttttaggacaattactgtacacattaaggtgtatgtcagatattcatattgacccaaatgtgtaatattccagttttctctgcataagtaattaaaatatacttaaaaattaatagttttatctgggtacaaataaacaggtgcctgaactagttcacagacaaggaaacttctatgtaaaaatcactatgatttctgaattgctatgtgaaactacagatctttggaacactgtttaggtagggtgttaagacttacacagtacctcgtttctacacagagaaagaaatggccatacttcaggaactgcagtgcttatgaggggatatttaggcctcttgaatttttgatgtagatgggcatttttttaaggtagtggttaattacctttatgtgaactttgaatggtttaacaaaagatttgtttttgtagagattttaaagggggagaattctagaaataaatgttacctaattattacagccttaaagacaaaaatccttgttgaagtttttttaaaaaaagctaaattacatagacttaggcattaacatgtttgtggaagaatatagcagacgtatattgtatcatttgagtgaatgttcccaagtaggcattctaggctctatttaactgagtcacactgcataggaatttagaacctaacttttataggttatcaaaactgttgtcaccattgcacaattttgtcctaatatatacatagaaactttgtggggcatgttaagttacagtttgcacaagttcatctcatttgtattccattgattttttttttcttctaaacattttttcttcaaacagtatataactttttttaggggatttttttttagacagcaaaaactatctgaagatttccatttgtcaaaaagtaatgatttcttgataattgtgtagtaatgttttttagaacccagcagttaccttaaagctgaatttatatttagtaacttctgtgttaatactggatagcatgaattctgcattgagaaactgaatagctgtcataaaatgaaactttctttctaaagaaagatactcacatgagttcttgaagaatagtcataactagattaagatctgtgttttagtttaatagtttgaagtgcctgtttgggataatgataggtaatttagatgaatttaggggaaaaaaaagttatctgcagatatgttgagggcccatctctccccccacacccccacagagctaactgggttacagtgttttatccgaaagtttccaattccactgtcttgtgttttcatgttgaaaatacttttgcatttttcctttgagtgccaatttcttactagtactatttcttaatgtaacatgtttacctggaatgtattttaactatttttgtatagtgtaaactgaaacatgcacattttgtacattgtgctttcttttgtgggacatatgcagtgtgatccagttgttttccatcatttggttgcgctgacctaggaatgttggtcatatcaaacattaaaaatgaccactcttttaattgaaattaacttttaaatgtttataggagtatgtgctgtgaagtgatctaaaatttgtaatatttttgtcatgaactgtactactcctaattattgtaatgtaataaaaatagttacagtgacaaaaaaaaaaaaaaa

SEQ ID NO: 375 - DNA, 5312 bp, Homo sapiens
ggccgcggcggcggaggcagcagcggcggcggcagtggcggcggcgaaggtggcggcggctcggccagtactcccggcccccgccatttcggactgggagcgagcgcggcgcaggcactgaaggcggcggcggggccagaggctcagcggctcccaggtgcgggagagaggcctgctgaaaatgactgaatataaacttgtggtagttggagctggtggcgtaggcaagagtgccttgacgatacagctaattcagaatcattttgtggacgaatatgatccaacaatagaggattcctacaggaagcaagtagtaattgatggagaaacctgtctcttggatattctcgacacagcaggtcaagaggagtacagtgcaatgagggaccagtacatgaggactggggagggctttctttgtgtatttgccataaataatactaaatcatttgaagatattcaccattatagagaacaaattaaaagagttaaggactctgaagatgtacctatggtcctagtaggaaataaatgtgatttgccttctagaacagtagacacaaaacaggctcaggacttagcaagaagttatggaattccttttattgaaacatcagcaaagacaagacagggtgttgatgatgccttctatacattagttcgagaaattcgaaaacataaagaaaagatgagcaaagatggtaaaaagaagaaaaagaagtcaaagacaaagtgtgtaattatgtaaatacaatttgtacttttttcttaaggcatactagtacaagtggtaatttttgtacattacactaaattattagcatttgttttagcattacctaatttttttcctgctccatgcagactgttagcttttaccttaaatgcttattttaaaatgacagtggaagtttttttttcctctaagtgccagtattcccagagttttggtttttgaactagcaatgcctgtgaaaaagaaactgaatacctaagatttctgtcttggggtttttggtgcatgcagttgattacttcttatttttcttaccaattgtgaatgttggtgtgaaacaaattaatgaagcttttgaatcatccctattctgtgttttatctagtcacataaatggattaattactaatttcagttgagaccttctaattggtttttactgaaacattgagggaacacaaatttatgggcttcctgatgatgattcttctaggcatcatgtcctatagtttgtcatccctgatgaatgtaaagttacactgttcacaaaggttttgtctcctttccactgctattagtcatggtcactctccccaaaatattatattttttctataaaaagaaaaaaatggaaaaaaattacaaggcaatggaaactattataaggccatttccttttcacattagataaattactataaagactcctaatagcttttcctgttaaggcagacccagtatgaaatggggattattatagcaaccattttggggctatatttacatgctactaaatttttataataattgaaaagattttaacaagtataaaaaattctcataggaattaaatgtagtctccctgtgtcagactgctctttcatagtataactttaaatcttttcttcaacttgagtctttgaagatagttttaattctgcttgtgacattaaaagattatttgggccagttatagcttattaggtgttgaagagaccaaggttgcaaggccaggccctgtgtgaacctttgagctttcatagagagtttcacagcatggactgtgtccccacggtcatccagtgttgtcatgcattggttagtcaaaatggggagggactagggcagtttggatagctcaacaagatacaatctcactctgtggtggtcctgctgacaaatcaagagcattgcttttgtttcttaagaaaacaaactcttttttaaaaattacttttaaatattaactcaaaagttgagattttggggtggtggtgtgccaagacattaattttttttttaaacaatgaagtgaaaaagttttacaatctctaggtttggctagttctcttaacactggttaaattaacattgcataaacacttttcaagtctgatccatatttaataatgctttaaaataaaaataaaaacaatccttttgataaatttaaaatgttacttattttaaaataaatgaagtgagatggcatggtgaggtgaaagtatcactggactaggaagaaggtgacttaggttctagataggtgtcttttaggactctgattttgaggacatcacttactatccatttcttcatgttaaaagaagtcatctcaaactcttagttttttttttttacaactatgtaatttatattccatttacataaggatacacttatttgtcaagctcagcacaatctgtaaatttttaacctatgttacaccatcttcagtgccagtcttgggcaaaattgtgcaagaggtgaagtttatatttgaatatccattctcgttttaggactcttcttccatattagtgtcatcttgcctccctaccttccacatgccccatgacttgatgcagttttaatacttgtaattcccctaaccataagatttactgctgctgtggatatctccatgaagttttcccactgagtcacatcagaaatgccctacatcttatttcctcagggctcaagagaatctgacagataccataaagggatttgacctaatcactaattttcaggtggtggctgatgctttgaacatctctttgctgcccaatccattagcgacagtaggatttttcaaacctggtatgaatagacagaaccctatccagtggaaggagaatttaataaagatagtgctgaaagaattccttaggtaatctataactaggactactcctggtaacagtaatacattccattgttttagtaaccagaaatcttcatgcaatgaaaaatactttaattcatgaagcttactttttttttttggtgtcagagtctcgctcttgtcacccaggctggaatgcagtggcgccatctcagctcactgcaacctccatctcccaggttcaagcgattctcgtgcctcggcctcctgagtagctgggattacaggcgtgtgccactacactcaactaatttttgtatttttaggagagacggggtttcaccctgttggccaggctggtctcgaactcctgacctcaagtgattcacccaccttggcctcataaacctgttttgcagaactcatttattcagcaaatatttattgagtgcctaccagatgccagtcaccgcacaaggcactgggtatatggtatccccaaacaagagacataatcccggtccttaggtagtgctagtgtggtctgtaatatcttactaaggcctttggtatacgacccagagataacacgatgcgtattttagttttgcaaagaaggggtttggtctctgtgccagctctataattgttttgctacgattccactgaaactcttcgatcaagctactttatgtaaatcacttcattgttttaaaggaataaacttgattatattgtttttttatttggcataactgtgattcttttaggacaattactgtacacattaaggtgtatgtcagatattcatattgacccaaatgtgtaatattccagttttctctgcataagtaattaaaatatacttaaaaattaatagttttatctgggtacaaataaacaggtgcctgaactagttcacagacaaggaaacttctatgtaaaaatcactatgatttctgaattgctatgtgaaactacagatctttggaacactgtttaggtagggtgttaagacttacacagtacctcgtttctacacagagaaagaaatggccatacttcaggaactgcagtgcttatgaggggatatttaggcctcttgaatttttgatgtagatgggcatttttttaaggtagtggttaattacctttatgtgaactttgaatggtttaacaaaagatttgtttttgtagagattttaaagggggagaattctagaaataaatgttacctaattattacagccttaaagacaaaaatccttgttgaagtttttttaaaaaaagctaaattacatagacttaggcattaacatgtttgtggaagaatatagcagacgtatattgtatcatttgagtgaatgttcccaagtaggcattctaggctctatttaactgagtcacactgcataggaatttagaacctaacttttataggttatcaaaactgttgtcaccattgcacaattttgtcctaatatatacatagaaactttgtggggcatgttaagttacagtttgcacaagttcatctcatttgtattccattgattttttttttcttctaaacattttttcttcaaacagtatataactttttttaggggatttttttttagacagcaaaaactatctgaagatttccatttgtcaaaaagtaatgatttcttgataattgtgtagtaatgttttttagaacccagcagttaccttaaagctgaatttatatttagtaacttctgtgttaatactggatagcatgaattctgcattgagaaactgaatagctgtcataaaatgaaactttctttctaaagaaagatactcacatgagttcttgaagaatagtcataactagattaagatctgtgttttagtttaatagtttgaagtgcctgtttgggataatgataggtaatttagatgaatttaggggaaaaaaaagttatctgcagatatgttgagggcccatctctccccccacacccccacagagctaactgggttacagtgttttatccgaaagtttccaattccactgtcttgtgttttcatgttgaaaatacttttgcatttttcctttgagtgccaatttcttactagtactatttcttaatgtaacatgtttacctggaatgtattttaactatttttgtatagtgtaaactgaaacatgcacattttgtacattgtgctttcttttgtgggacatatgcagtgtgatccagttgttttccatcatttggttgcgctgacctaggaatgttggtcatatcaaacattaaaaatgaccactcttttaattgaaattaacttttaaatgtttataggagtatgtgctgtgaagtgatctaaaatttgtaatatttttgtcatgaactgtactactcctaattattgtaatgtaataaaaatagttacagtgacaaaaaaaaaaaaaaa

SEQ ID NO: 376 - DNA, 2785 bp, Homo sapiens
ggtgtccggagccgcggacctagagatcccagaagccacagcgcagcggcccggcccgccactatttccaggctcagcggggcaggggccgccgcccaccgcccgccgccatggggctgaaggccgcccagaagacgctgttcccgctgcgctccatcgacgacgtggtgcgcctgtttgctgccgagctgggccgagaggagccggacctggtgctcctttccttggtgctgggcttcgtggagcattttctggctgtcaaccgcgtcatccctaccaacgttcccgagctcaccttccagcccagccccgcccccgacccgcctggcggcctcacctactttcccgtggccgacctgtctatcatcgccgccctctatgcccgcttcaccgcccagatccgaggcgccgtcgacctgtccctctatcctcgagaagggggtgtctccagccgtgagctggtgaagaaggtctccgatgtcatatggaacagcctcagccgctcctacttcaaggatcgggcccacatccagtccctcttcagcttcatcacaggttggagcccagtaggcaccaaattggacagctccggtgtggcctttgctgtggttggggcctgccaggccctgggtctccgggatgtccacctcgccctgtctgaggatcatgcctgggtagtgtttgggcccaatggggagcagacagctgaggtcacctggcacggcaagggcaacgaggaccgcaggggccagacagtcaatgccggtgtggctgagcggagctggctgtacctgaaaggatcatacatgcgctgtgaccgcaagatggaggtggcgttcatggtgtgtgccatcaacccttccattgacctgcacaccgactcgctggagcttctgcagctgcagcagaagctgctctggctgctctatgacctgggacatctggaaaggtaccccatggccttagggaacctggcagatctagaggagctggagcccacccctggccggccagacccactcaccctctaccacaagggcattgcctcagccaagacctactatcgggatgaacacatctacccctacatgtacctggctggctaccactgtcgcaaccgcaatgtgcgggaagccctgcaggcctgggcggacacggccactgtcatccaggactacaactactgccgggaagacgaggagatctacaaggagttctttgaagtagccaatgatgtcatccccaacctgctgaaggaggcagccagcttgctggaggcgggcgaggagcggccgggggagcaaagccagggcacccagagccaaggttccgccctccaggaccctgagtgcttcgcccacctgctgcgattctacgacggcatctgcaaatgggaggagggcagtcccacgcctgtgctgcacgtgggctgggccacctttcttgtgcagtccctaggccgttttgagggacaggtgcggcagaaggtgcgcatagtgagccgagaggccgaggcggccgaggccgaggagccgtggggcgaggaagcccgggaaggccggcggcggggcccacggcgggagtccaagccagaggagcccccgccgcccaagaagccagcactggacaagggcctgggcaccggccagggtgcagtgtcaggacccccccggaagcctcctgggactgtcgctggcacagcccgaggccctgaaggtggcagcacggctcaggtgccagcacccgcagcatcaccaccgccggagggtccagtgctcactttccagagtgagaagatgaagggcatgaaggagctgctggtggccaccaagatcaactcgagcgccatcaagctgcaactcacggcacagtcgcaagtgcagatgaagaagcagaaagtgtccacccctagtgactacactctgtctttcctcaagcggcagcgcaaaggcctctgaactactggggacttcggaccgcttgtggggacccaggctccgcccttagtcccccaactctgagcccatgttctgcccccagcccaaaggggacaggcctcacctctacccaaaccctaggttcccggtcccgagtacagtctgtatcaaacccacgattttctccagctcagaacccagggctctgccccagtcgttagaatataggtctcttctcccagaatcccagccggccaatggaaacctcacgctgggtcctaattaccagtctttaaaggcccagcccctagaaacccaagctcctcctcggaaccgctcacctagagccagaccaacgttactcagggctcctcccagcttgtaggagctgaggtttcacccttaacccaaggagcacaggtcccacctccagcccgggagcctaggaccactcagcccctaggagtatatttccgcacttcagaattccatatcttgcgaatccaagctccctgccccaaataacttcagtcctgctccagaatttggaaatcctagtttcctctccttcgtatcccgagtctgggacacaaaactccgcccccagcctatgagcatcctgagccccgccctcttcctgacgaaactggccccggatcagagcaggacctcccttccgaccctctgggaacctcccagaggtccagcccatctcggagcatcccggaggaaatctgcagagggttaggagtgggtgacaagagcctgatctcttcctgttttgtacatagatttatttttcagttccaagaaagatgaatacattttgttaaaaaaaataaaaaaaa

SEQ ID NO: 377 - DNA, 2770 bp, Homo sapiens
ggtgtccggagccgcggacctagagatcccagaagccacagcgcagcggcccggcccgccactatttccaggctcagcggggcaggggccgccgcccaccgcccgccgccatggggctgaaggccgcccagaagacgctgttcccgctgcgctccatcgacgacgtggtgcgcctgtttgctgccgagctgggccgagaggagccggacctggtgctcctttccttggtgctgggcttcgtggagcattttctggctgtcaaccgcgtcatccctaccaacgttcccgagctcaccttccagcccagccccgcccccgacccgcctggcggcctcacctactttcccgtggccgacctgtctatcatcgccgccctctatgcccgcttcaccgcccagatccgaggcgccgtcgacctgtccctctatcctcgagaagggggtgtctccagccgtgagctggtgaagaaggtctccgatgtcatatggaacagcctcagccgctcctacttcaaggatcgggcccacatccagtccctcttcagcttcatcacaggcaccaaattggacagctccggtgtggcctttgctgtggttggggcctgccaggccctgggtctccgggatgtccacctcgccctgtctgaggatcatgcctgggtagtgtttgggcccaatggggagcagacagctgaggtcacctggcacggcaagggcaacgaggaccgcaggggccagacagtcaatgccggtgtggctgagcggagctggctgtacctgaaaggatcatacatgcgctgtgaccgcaagatggaggtggcgttcatggtgtgtgccatcaacccttccattgacctgcacaccgactcgctggagcttctgcagctgcagcagaagctgctctggctgctctatgacctgggacatctggaaaggtaccccatggccttagggaacctggcagatctagaggagctggagcccacccctggccggccagacccactcaccctctaccacaagggcattgcctcagccaagacctactatcgggatgaacacatctacccctacatgtacctggctggctaccactgtcgcaaccgcaatgtgcgggaagccctgcaggcctgggcggacacggccactgtcatccaggactacaactactgccgggaagacgaggagatctacaaggagttctttgaagtagccaatgatgtcatccccaacctgctgaaggaggcagccagcttgctggaggcgggcgaggagcggccgggggagcaaagccagggcacccagagccaaggttccgccctccaggaccctgagtgcttcgcccacctgctgcgattctacgacggcatctgcaaatgggaggagggcagtcccacgcctgtgctgcacgtgggctgggccacctttcttgtgcagtccctaggccgttttgagggacaggtgcggcagaaggtgcgcatagtgagccgagaggccgaggcggccgaggccgaggagccgtggggcgaggaagcccgggaaggccggcggcggggcccacggcgggagtccaagccagaggagcccccgccgcccaagaagccagcactggacaagggcctgggcaccggccagggtgcagtgtcaggacccccccggaagcctcctgggactgtcgctggcacagcccgaggccctgaaggtggcagcacggctcaggtgccagcacccgcagcatcaccaccgccggagggtccagtgctcactttccagagtgagaagatgaagggcatgaaggagctgctggtggccaccaagatcaactcgagcgccatcaagctgcaactcacggcacagtcgcaagtgcagatgaagaagcagaaagtgtccacccctagtgactacactctgtctttcctcaagcggcagcgcaaaggcctctgaactactggggacttcggaccgcttgtggggacccaggctccgcccttagtcccccaactctgagcccatgttctgcccccagcccaaaggggacaggcctcacctctacccaaaccctaggttcccggtcccgagtacagtctgtatcaaacccacgattttctccagctcagaacccagggctctgccccagtcgttagaatataggtctcttctcccagaatcccagccggccaatggaaacctcacgctgggtcctaattaccagtctttaaaggcccagcccctagaaacccaagctcctcctcggaaccgctcacctagagccagaccaacgttactcagggctcctcccagcttgtaggagctgaggtttcacccttaacccaaggagcacaggtcccacctccagcccgggagcctaggaccactcagcccctaggagtatatttccgcacttcagaattccatatcttgcgaatccaagctccctgccccaaataacttcagtcctgctccagaatttggaaatcctagtttcctctccttcgtatcccgagtctgggacacaaaactccgcccccagcctatgagcatcctgagccccgccctcttcctgacgaaactggccccggatcagagcaggacctcccttccgaccctctgggaacctcccagaggtccagcccatctcggagcatcccggaggaaatctgcagagggttaggagtgggtgacaagagcctgatctcttcctgttttgtacatagatttatttttcagttccaagaaagatgaatacattttgttaaaaaaaataaaaaaaa

SEQ ID NO: 378 - DNA, 2748 bp, Homo sapiens
gctccgggcggcgtgcgccgcggtgcctagtgtgggatgtaagcgcggaggccgccgcccaccgcccgccgccatggggctgaaggccgcccagaagacgctgttcccgctgcgctccatcgacgacgtggtgcgcctgtttgctgccgagctgggccgagaggagccggacctggtgctcctttccttggtgctgggcttcgtggagcattttctggctgtcaaccgcgtcatccctaccaacgttcccgagctcaccttccagcccagccccgcccccgacccgcctggcggcctcacctactttcccgtggccgacctgtctatcatcgccgccctctatgcccgcttcaccgcccagatccgaggcgccgtcgacctgtccctctatcctcgagaagggggtgtctccagccgtgagctggtgaagaaggtctccgatgtcatatggaacagcctcagccgctcctacttcaaggatcgggcccacatccagtccctcttcagcttcatcacaggttggagcccagtaggcaccaaattggacagctccggtgtggcctttgctgtggttggggcctgccaggccctgggtctccgggatgtccacctcgccctgtctgaggatcatgcctgggtagtgtttgggcccaatggggagcagacagctgaggtcacctggcacggcaagggcaacgaggaccgcaggggccagacagtcaatgccggtgtggctgagcggagctggctgtacctgaaaggatcatacatgcgctgtgaccgcaagatggaggtggcgttcatggtgtgtgccatcaacccttccattgacctgcacaccgactcgctggagcttctgcagctgcagcagaagctgctctggctgctctatgacctgggacatctggaaaggtaccccatggccttagggaacctggcagatctagaggagctggagcccacccctggccggccagacccactcaccctctaccacaagggcattgcctcagccaagacctactatcgggatgaacacatctacccctacatgtacctggctggctaccactgtcgcaaccgcaatgtgcgggaagccctgcaggcctgggcggacacggccactgtcatccaggactacaactactgccgggaagacgaggagatctacaaggagttctttgaagtagccaatgatgtcatccccaacctgctgaaggaggcagccagcttgctggaggcgggcgaggagcggccgggggagcaaagccagggcacccagagccaaggttccgccctccaggaccctgagtgcttcgcccacctgctgcgattctacgacggcatctgcaaatgggaggagggcagtcccacgcctgtgctgcacgtgggctgggccacctttcttgtgcagtccctaggccgttttgagggacaggtgcggcagaaggtgcgcatagtgagccgagaggccgaggcggccgaggccgaggagccgtggggcgaggaagcccgggaaggccggcggcggggcccacggcgggagtccaagccagaggagcccccgccgcccaagaagccagcactggacaagggcctgggcaccggccagggtgcagtgtcaggacccccccggaagcctcctgggactgtcgctggcacagcccgaggccctgaaggtggcagcacggctcaggtgccagcacccgcagcatcaccaccgccggagggtccagtgctcactttccagagtgagaagatgaagggcatgaaggagctgctggtggccaccaagatcaactcgagcgccatcaagctgcaactcacggcacagtcgcaagtgcagatgaagaagcagaaagtgtccacccctagtgactacactctgtctttcctcaagcggcagcgcaaaggcctctgaactactggggacttcggaccgcttgtggggacccaggctccgcccttagtcccccaactctgagcccatgttctgcccccagcccaaaggggacaggcctcacctctacccaaaccctaggttcccggtcccgagtacagtctgtatcaaacccacgattttctccagctcagaacccagggctctgccccagtcgttagaatataggtctcttctcccagaatcccagccggccaatggaaacctcacgctgggtcctaattaccagtctttaaaggcccagcccctagaaacccaagctcctcctcggaaccgctcacctagagccagaccaacgttactcagggctcctcccagcttgtaggagctgaggtttcacccttaacccaaggagcacaggtcccacctccagcccgggagcctaggaccactcagcccctaggagtatatttccgcacttcagaattccatatcttgcgaatccaagctccctgccccaaataacttcagtcctgctccagaatttggaaatcctagtttcctctccttcgtatcccgagtctgggacacaaaactccgcccccagcctatgagcatcctgagccccgccctcttcctgacgaaactggccccggatcagagcaggacctcccttccgaccctctgggaacctcccagaggtccagcccatctcggagcatcccggaggaaatctgcagagggttaggagtgggtgacaagagcctgatctcttcctgttttgtacatagatttatttttcagttccaagaaagatgaatacattttgttaaaaaaaataaaaaaaa

SEQ ID NO: 379 - DNA, 2736 bp, Homo sapiens
gctccgggcggcgtgcgccgcggtgcctagtgtgggatgccgccgcccaccgcccgccgccatggggctgaaggccgcccagaagacgctgttcccgctgcgctccatcgacgacgtggtgcgcctgtttgctgccgagctgggccgagaggagccggacctggtgctcctttccttggtgctgggcttcgtggagcattttctggctgtcaaccgcgtcatccctaccaacgttcccgagctcaccttccagcccagccccgcccccgacccgcctggcggcctcacctactttcccgtggccgacctgtctatcatcgccgccctctatgcccgcttcaccgcccagatccgaggcgccgtcgacctgtccctctatcctcgagaagggggtgtctccagccgtgagctggtgaagaaggtctccgatgtcatatggaacagcctcagccgctcctacttcaaggatcgggcccacatccagtccctcttcagcttcatcacaggttggagcccagtaggcaccaaattggacagctccggtgtggcctttgctgtggttggggcctgccaggccctgggtctccgggatgtccacctcgccctgtctgaggatcatgcctgggtagtgtttgggcccaatggggagcagacagctgaggtcacctggcacggcaagggcaacgaggaccgcaggggccagacagtcaatgccggtgtggctgagcggagctggctgtacctgaaaggatcatacatgcgctgtgaccgcaagatggaggtggcgttcatggtgtgtgccatcaacccttccattgacctgcacaccgactcgctggagcttctgcagctgcagcagaagctgctctggctgctctatgacctgggacatctggaaaggtaccccatggccttagggaacctggcagatctagaggagctggagcccacccctggccggccagacccactcaccctctaccacaagggcattgcctcagccaagacctactatcgggatgaacacatctacccctacatgtacctggctggctaccactgtcgcaaccgcaatgtgcgggaagccctgcaggcctgggcggacacggccactgtcatccaggactacaactactgccgggaagacgaggagatctacaaggagttctttgaagtagccaatgatgtcatccccaacctgctgaaggaggcagccagcttgctggaggcgggcgaggagcggccgggggagcaaagccagggcacccagagccaaggttccgccctccaggaccctgagtgcttcgcccacctgctgcgattctacgacggcatctgcaaatgggaggagggcagtcccacgcctgtgctgcacgtgggctgggccacctttcttgtgcagtccctaggccgttttgagggacaggtgcggcagaaggtgcgcatagtgagccgagaggccgaggcggccgaggccgaggagccgtggggcgaggaagcccgggaaggccggcggcggggcccacggcgggagtccaagccagaggagcccccgccgcccaagaagccagcactggacaagggcctgggcaccggccagggtgcagtgtcaggacccccccggaagcctcctgggactgtcgctggcacagcccgaggccctgaaggtggcagcacggctcaggtgccagcacccgcagcatcaccaccgccggagggtccagtgctcactttccagagtgagaagatgaagggcatgaaggagctgctggtggccaccaagatcaactcgagcgccatcaagctgcaactcacggcacagtcgcaagtgcagatgaagaagcagaaagtgtccacccctagtgactacactctgtctttcctcaagcggcagcgcaaaggcctctgaactactggggacttcggaccgcttgtggggacccaggctccgcccttagtcccccaactctgagcccatgttctgcccccagcccaaaggggacaggcctcacctctacccaaaccctaggttcccggtcccgagtacagtctgtatcaaacccacgattttctccagctcagaacccagggctctgccccagtcgttagaatataggtctcttctcccagaatcccagccggccaatggaaacctcacgctgggtcctaattaccagtctttaaaggcccagcccctagaaacccaagctcctcctcggaaccgctcacctagagccagaccaacgttactcagggctcctcccagcttgtaggagctgaggtttcacccttaacccaaggagcacaggtcccacctccagcccgggagcctaggaccactcagcccctaggagtatatttccgcacttcagaattccatatcttgcgaatccaagctccctgccccaaataacttcagtcctgctccagaatttggaaatcctagtttcctctccttcgtatcccgagtctgggacacaaaactccgcccccagcctatgagcatcctgagccccgccctcttcctgacgaaactggccccggatcagagcaggacctcccttccgaccctctgggaacctcccagaggtccagcccatctcggagcatcccggaggaaatctgcagagggttaggagtgggtgacaagagcctgatctcttcctgttttgtacatagatttatttttcagttccaagaaagatgaatacattttgttaaaaaaaataaaaaaaa

SEQ ID NO: 380 - DNA, 3172 bp, Homo sapiens
caatccctgagtatctcgggaaggaggtgtccggagccgcggacctagagatcccagaagccacagcgcagcggcccggcccgccactatttccaggctcagcggggcaggggtgggcccagactccacttcccggcgggtagtgcgaccctaggggcgggacttcatgtcccagcaggctccgggcggcgtgcgccgcggtgcctagtgtgggatgtaagcgcggaggtgggcgagggggaccgaggccaggactctccttggggtttgggggcttgacctgggtgcgctttctggacagactttacagccccgggggcacagtcgtagagagggggcggggcggccattggggctcctcattggggtgcttggggcgcaccccatcgggtaccgggcgtcccggaattgtgggggacaaaaaggctctgcagtctcggctgaggggtctcaccgacaaaagaggggaagccggccgccgcccaccgcccgccgccatggggctgaaggccgcccagaagacgctgttcccgctgcgctccatcgacgacgtggtgcgcctgtttgctgccgagctgggccgagaggagccggacctggtgctcctttccttggtgctgggcttcgtggagcattttctggctgtcaaccgcgtcatccctaccaacgttcccgagctcaccttccagcccagccccgcccccgacccgcctggcggcctcacctactttcccgtggccgacctgtctatcatcgccgccctctatgcccgcttcaccgcccagatccgaggcgccgtcgacctgtccctctatcctcgagaagggggtgtctccagccgtgagctggtgaagaaggtctccgatgtcatatggaacagcctcagccgctcctacttcaaggatcgggcccacatccagtccctcttcagcttcatcacaggttggagcccagtaggcaccaaattggacagctccggtgtggcctttgctgtggttggggcctgccaggccctgggtctccgggatgtccacctcgccctgtctgaggatcatgcctgggtagtgtttgggcccaatggggagcagacagctgaggtcacctggcacggcaagggcaacgaggaccgcaggggccagacagtcaatgccggtgtggctgagcggagctggctgtacctgaaaggatcatacatgcgctgtgaccgcaagatggaggtggcgttcatggtgtgtgccatcaacccttccattgacctgcacaccgactcgctggagcttctgcagctgcagcagaagctgctctggctgctctatgacctgggacatctggaaaggtaccccatggccttagggaacctggcagatctagaggagctggagcccacccctggccggccagacccactcaccctctaccacaagggcattgcctcagccaagacctactatcgggatgaacacatctacccctacatgtacctggctggctaccactgtcgcaaccgcaatgtgcgggaagccctgcaggcctgggcggacacggccactgtcatccaggactacaactactgccgggaagacgaggagatctacaaggagttctttgaagtagccaatgatgtcatccccaacctgctgaaggaggcagccagcttgctggaggcgggcgaggagcggccgggggagcaaagccagggcacccagagccaaggttccgccctccaggaccctgagtgcttcgcccacctgctgcgattctacgacggcatctgcaaatgggaggagggcagtcccacgcctgtgctgcacgtgggctgggccacctttcttgtgcagtccctaggccgttttgagggacaggtgcggcagaaggtgcgcatagtgagccgagaggccgaggcggccgaggccgaggagccgtggggcgaggaagcccgggaaggccggcggcggggcccacggcgggagtccaagccagaggagcccccgccgcccaagaagccagcactggacaagggcctgggcaccggccagggtgcagtgtcaggacccccccggaagcctcctgggactgtcgctggcacagcccgaggccctgaaggtggcagcacggctcaggtgccagcacccgcagcatcaccaccgccggagggtccagtgctcactttccagagtgagaagatgaagggcatgaaggagctgctggtggccaccaagatcaactcgagcgccatcaagctgcaactcacggcacagtcgcaagtgcagatgaagaagcagaaagtgtccacccctagtgactacactctgtctttcctcaagcggcagcgcaaaggcctctgaactactggggacttcggaccgcttgtggggacccaggctccgcccttagtcccccaactctgagcccatgttctgcccccagcccaaaggggacaggcctcacctctacccaaaccctaggttcccggtcccgagtacagtctgtatcaaacccacgattttctccagctcagaacccagggctctgccccagtcgttagaatataggtctcttctcccagaatcccagccggccaatggaaacctcacgctgggtcctaattaccagtctttaaaggcccagcccctagaaacccaagctcctcctcggaaccgctcacctagagccagaccaacgttactcagggctcctcccagcttgtaggagctgaggtttcacccttaacccaaggagcacaggtcccacctccagcccgggagcctaggaccactcagcccctaggagtatatttccgcacttcagaattccatatcttgcgaatccaagctccctgccccaaataacttcagtcctgctccagaatttggaaatcctagtttcctctccttcgtatcccgagtctgggacacaaaactccgcccccagcctatgagcatcctgagccccgccctcttcctgacgaaactggccccggatcagagcaggacctcccttccgaccctctgggaacctcccagaggtccagcccatctcggagcatcccggaggaaatctgcagagggttaggagtgggtgacaagagcctgatctcttcctgttttgtacatagatttatttttcagttccaagaaagatgaatacattttgttaaaaaaaataaaaaaaa

SEQ ID NO: 381 - DNA, 3179 bp, Homo sapiens
tatatttatgtatatgcacatacacacaaaattaggcgggagtggtggcgcacgcctgtgatcacagctactcgggaggctgaggcacgagaatcgcttgagcccgtgaagtcgaggctgcagtgagcccagatcgagccactgcattccagcctgggcgaaagagaaagaccgtgtctcaaaacaaacaaacaaaagctactcttagcacgtgttagagtatctcgcgggcggaagtgggaaacgagtgctgcacacagagtaggcatctttatatgttaacagacactgatacccagctaaagcggctgaacacatttactctctggcagtgtttaaaagtatctgtttttctcatattgttttattttaattttttctggatcaagcaacctgatctttttcctcataacttgccgaccgacccgtgacagcaaaaccggcagaagctcggcgacctcccaccccgagtctgcaggtagccgccgcccaccgcccgccgccatggggctgaaggccgcccagaagacgctgttcccgctgcgctccatcgacgacgtggtgcgcctgtttgctgccgagctgggccgagaggagccggacctggtgctcctttccttggtgctgggcttcgtggagcattttctggctgtcaaccgcgtcatccctaccaacgttcccgagctcaccttccagcccagccccgcccccgacccgcctggcggcctcacctactttcccgtggccgacctgtctatcatcgccgccctctatgcccgcttcaccgcccagatccgaggcgccgtcgacctgtccctctatcctcgagaagggggtgtctccagccgtgagctggtgaagaaggtctccgatgtcatatggaacagcctcagccgctcctacttcaaggatcgggcccacatccagtccctcttcagcttcatcacaggttggagcccagtaggcaccaaattggacagctccggtgtggcctttgctgtggttggggcctgccaggccctgggtctccgggatgtccacctcgccctgtctgaggatcatgcctgggtagtgtttgggcccaatggggagcagacagctgaggtcacctggcacggcaagggcaacgaggaccgcaggggccagacagtcaatgccggtgtggctgagcggagctggctgtacctgaaaggatcatacatgcgctgtgaccgcaagatggaggtggcgttcatggtgtgtgccatcaacccttccattgacctgcacaccgactcgctggagcttctgcagctgcagcagaagctgctctggctgctctatgacctgggacatctggaaaggtaccccatggccttagggaacctggcagatctagaggagctggagcccacccctggccggccagacccactcaccctctaccacaagggcattgcctcagccaagacctactatcgggatgaacacatctacccctacatgtacctggctggctaccactgtcgcaaccgcaatgtgcgggaagccctgcaggcctgggcggacacggccactgtcatccaggactacaactactgccgggaagacgaggagatctacaaggagttctttgaagtagccaatgatgtcatccccaacctgctgaaggaggcagccagcttgctggaggcgggcgaggagcggccgggggagcaaagccagggcacccagagccaaggttccgccctccaggaccctgagtgcttcgcccacctgctgcgattctacgacggcatctgcaaatgggaggagggcagtcccacgcctgtgctgcacgtgggctgggccacctttcttgtgcagtccctaggccgttttgagggacaggtgcggcagaaggtgcgcatagtgagccgagaggccgaggcggccgaggccgaggagccgtggggcgaggaagcccgggaaggccggcggcggggcccacggcgggagtccaagccagaggagcccccgccgcccaagaagccagcactggacaagggcctgggcaccggccagggtgcagtgtcaggacccccccggaagcctcctgggactgtcgctggcacagcccgaggccctgaaggtggcagcacggctcaggtgccagcacccgcagcatcaccaccgccggagggtccagtgctcactttccagagtgagaagatgaagggcatgaaggagctgctggtggccaccaagatcaactcgagcgccatcaagctgcaactcacggcacagtcgcaagtgcagatgaagaagcagaaagtgtccacccctagtgactacactctgtctttcctcaagcggcagcgcaaaggcctctgaactactggggacttcggaccgcttgtggggacccaggctccgcccttagtcccccaactctgagcccatgttctgcccccagcccaaaggggacaggcctcacctctacccaaaccctaggttcccggtcccgagtacagtctgtatcaaacccacgattttctccagctcagaacccagggctctgccccagtcgttagaatataggtctcttctcccagaatcccagccggccaatggaaacctcacgctgggtcctaattaccagtctttaaaggcccagcccctagaaacccaagctcctcctcggaaccgctcacctagagccagaccaacgttactcagggctcctcccagcttgtaggagctgaggtttcacccttaacccaaggagcacaggtcccacctccagcccgggagcctaggaccactcagcccctaggagtatatttccgcacttcagaattccatatcttgcgaatccaagctccctgccccaaataacttcagtcctgctccagaatttggaaatcctagtttcctctccttcgtatcccgagtctgggacacaaaactccgcccccagcctatgagcatcctgagccccgccctcttcctgacgaaactggccccggatcagagcaggacctcccttccgaccctctgggaacctcccagaggtccagcccatctcggagcatcccggaggaaatctgcagagggttaggagtgggtgacaagagcctgatctcttcctgttttgtacatagatttatttttcagttccaagaaagatgaatacattttgttaaaaaaaataaaaaaaa

SEQ ID NO: 382 - DNA, 3051 bp, Homo sapiens
tatatttatgtatatgcacatacacacaaaattaggcgggagtggtggcgcacgcctgtgatcacagctactcgggaggctgaggcacgagaatcgcttgagcccgtgaagtcgaggctgcagtgagcccagatcgagccactgcattccagcctgggcgaaagagaaagaccgtgtctcaaaacaaacaaacaaaagctactcttagcacgtgttagagtatctcgcgggcggaagtgggaaacgagtgctgcacacagacaacctgatctttttcctcataacttgccgaccgacccgtgacagcaaaaccggcagaagctcggcgacctcccaccccgagtctgcaggtagccgccgcccaccgcccgccgccatggggctgaaggccgcccagaagacgctgttcccgctgcgctccatcgacgacgtggtgcgcctgtttgctgccgagctgggccgagaggagccggacctggtgctcctttccttggtgctgggcttcgtggagcattttctggctgtcaaccgcgtcatccctaccaacgttcccgagctcaccttccagcccagccccgcccccgacccgcctggcggcctcacctactttcccgtggccgacctgtctatcatcgccgccctctatgcccgcttcaccgcccagatccgaggcgccgtcgacctgtccctctatcctcgagaagggggtgtctccagccgtgagctggtgaagaaggtctccgatgtcatatggaacagcctcagccgctcctacttcaaggatcgggcccacatccagtccctcttcagcttcatcacaggttggagcccagtaggcaccaaattggacagctccggtgtggcctttgctgtggttggggcctgccaggccctgggtctccgggatgtccacctcgccctgtctgaggatcatgcctgggtagtgtttgggcccaatggggagcagacagctgaggtcacctggcacggcaagggcaacgaggaccgcaggggccagacagtcaatgccggtgtggctgagcggagctggctgtacctgaaaggatcatacatgcgctgtgaccgcaagatggaggtggcgttcatggtgtgtgccatcaacccttccattgacctgcacaccgactcgctggagcttctgcagctgcagcagaagctgctctggctgctctatgacctgggacatctggaaaggtaccccatggccttagggaacctggcagatctagaggagctggagcccacccctggccggccagacccactcaccctctaccacaagggcattgcctcagccaagacctactatcgggatgaacacatctacccctacatgtacctggctggctaccactgtcgcaaccgcaatgtgcgggaagccctgcaggcctgggcggacacggccactgtcatccaggactacaactactgccgggaagacgaggagatctacaaggagttctttgaagtagccaatgatgtcatccccaacctgctgaaggaggcagccagcttgctggaggcgggcgaggagcggccgggggagcaaagccagggcacccagagccaaggttccgccctccaggaccctgagtgcttcgcccacctgctgcgattctacgacggcatctgcaaatgggaggagggcagtcccacgcctgtgctgcacgtgggctgggccacctttcttgtgcagtccctaggccgttttgagggacaggtgcggcagaaggtgcgcatagtgagccgagaggccgaggcggccgaggccgaggagccgtggggcgaggaagcccgggaaggccggcggcggggcccacggcgggagtccaagccagaggagcccccgccgcccaagaagccagcactggacaagggcctgggcaccggccagggtgcagtgtcaggacccccccggaagcctcctgggactgtcgctggcacagcccgaggccctgaaggtggcagcacggctcaggtgccagcacccgcagcatcaccaccgccggagggtccagtgctcactttccagagtgagaagatgaagggcatgaaggagctgctggtggccaccaagatcaactcgagcgccatcaagctgcaactcacggcacagtcgcaagtgcagatgaagaagcagaaagtgtccacccctagtgactacactctgtctttcctcaagcggcagcgcaaaggcctctgaactactggggacttcggaccgcttgtggggacccaggctccgcccttagtcccccaactctgagcccatgttctgcccccagcccaaaggggacaggcctcacctctacccaaaccctaggttcccggtcccgagtacagtctgtatcaaacccacgattttctccagctcagaacccagggctctgccccagtcgttagaatataggtctcttctcccagaatcccagccggccaatggaaacctcacgctgggtcctaattaccagtctttaaaggcccagcccctagaaacccaagctcctcctcggaaccgctcacctagagccagaccaacgttactcagggctcctcccagcttgtaggagctgaggtttcacccttaacccaaggagcacaggtcccacctccagcccgggagcctaggaccactcagcccctaggagtatatttccgcacttcagaattccatatcttgcgaatccaagctccctgccccaaataacttcagtcctgctccagaatttggaaatcctagtttcctctccttcgtatcccgagtctgggacacaaaactccgcccccagcctatgagcatcctgagccccgccctcttcctgacgaaactggccccggatcagagcaggacctcccttccgaccctctgggaacctcccagaggtccagcccatctcggagcatcccggaggaaatctgcagagggttaggagtgggtgacaagagcctgatctcttcctgttttgtacatagatttatttttcagttccaagaaagatgaatacattttgttaaaaaaaataaaaaaaa

SEQ ID NO: 383 - DNA, 4815 bp, Homo sapiens
gtaaactccccgcgctggggcgggcggccgcgagccggcgagcgggcagagctcggcactgcgccggggcgcacggctcgggggacccaggcccagctaccttccctccgcccccgggctctgttctcactttccagcagtggaaggacgggaagcgggagccatgcagtccgaatcggggatcgtgccggatttcgaagtcggggaggagtttcatgaagagcccaaaacctattacgaactcaaaagtcaaccgctgaagagcagcagttccgccgagcatcctggggcctccaagcctccgataagctcctccagtatgacatcacgcatcttgctacgccagcaactcatgcgtgagcagatgcaggagcaggagcgcagggagcagcagcagaagctgcaggcggcccagttcatgcaacagagagtgcccgtgagtcagacaccagccataaacgtcagtgtgcccaccacccttccctctgccacgcaggtgccgatggaagtccttaaggtgcagacccacctcgaaaaccccaccaagtaccacatacagcaagcccaacggcagcaggtaaagcagtacctttctaccactttagcaaataaacatgccaaccaagtcctgagcttgccatgtccaaaccagcctggcgatcatgtcatgccaccggtgccggggagcagcgcacccaacagccccatggctatgcttacgcttaactccaactgtgaaaaagagggattttataagtttgaagagcaaaacagggcagagagcgagtgcccaggcatgaacacacattcacgagcgtcctgtatgcagatggatgatgtaatcgatgacatcattagcctagaatcaagttataatgaggaaatcttgggcttgatggatcctgctttgcaaatggcaaatacgttgcctgtctcgggaaacttgattgatctttatggaaaccaaggtctgcccccaccaggcctcaccatcagcaactcctgtccagccaaccttcccaacataaaaagggagctcacagagtctgaagcaagagcactggccaaagagaggcagaaaaaggacaatcacaacctgattgaacgaagaagaagatttaacataaatgaccgcattaaagaactaggtactttgattcccaagtcaaatgatccagacatgcgctggaacaagggaaccatcttaaaagcatccgtggactatatccgaaagttgcaacgagaacagcaacgcgcaaaagaacttgaaaaccgacagaagaaactggagcacgccaaccggcatttgttgctcagaatacaggaacttgaaatgcaggctcgagctcatggactttcccttattccatccacgggtctctgctctccagatttggtgaatcggatcatcaagcaagaacccgttcttgagaactgcagccaagacctccttcagcatcatgcagacctaacctgtacaacaactctcgatctcacggatggcaccatcaccttcaacaacaacctcggaactgggactgaggccaaccaagcctatagtgtccccacaaaaatgggatccaaactggaagacatcctgatggacgacaccctttctcccgtcggtgtcactgatccactcctttcctcagtgtcccccggagcttccaaaacaagcagccggaggagcagtatgagcatggaagagacggagcacacttgttagcgaatcctccctgcactgcattcgcacaaactgcttcctttcttgattcgtagatttaataacttacctgaaggggttttcttgataattttcctttaatatgaaattttttttcatgctttatcaatagcccaggatatattttatttttagaattttgtgaaacagacttgtatattctattttacaactacaaatgcctccaaagtattgtacaaataagtgtgcagtatctgtgaactgaattcaccacagactttagctttctgagcaagaggattttgcgtcagagaaatgtctgtccatttttattcaggggaaacttgatttgagatttttatgcctgtgacttccttggaaatcaaatgtaaagtttaattgaaagaatgtaaagcaaccaaaaagaaaaaaaaaaagaaagaaagaggaaaagaaatccatactaacccttttccattttataaatgtattgattcattggtactgccttaaagatacagtacccctctagctttgtttagtctttatactgcaaactatttaaagaaatatgtattctgtaaaagaaaaaaaaaatgcggccttttcatgaggatcgtctggttagaaaacataactgataccaaccgaaactgaagggagttagaccaaggctctgaaatataaagtctaatcttgctctcttttattctgtgctgttacagttttcttcatcaatgagtgtgatccagtttttcataagatattttattttgaaatggaaattaatgtcctctcaaagtaaaatattgaggagcactgaaagtatgttttactttttttttattttatttttgcttttgataagaaaaccgaactgggcatatttctaattggctttactatttttatttttaaattatgttttactgttcatttgatttgtacagattctttattatcattgttcttttcaatatatttgtattaatttgtaagaatatgcatcttaaaatggcaagttttccatatttttacaactcactggtggttttccgcattctttgtacacccatgaaagaaaacttttatgcaaggtcttgcatttaaaagacagctttgcgaatattttgtaaattacagtctcactcagaactgtttttggacacatttaaggtgtagtattaataggttaaaaccaggctttctagaaagaataaacttacatatttatttttaggacatgaaaatagcaatattcttggagattgataaccatagcattaatacgcccattatggtcatttaaattggggtttatttcagcaaacttgttgaatttatttttaagaaagaaatactgtattgggaagttactgttacttgataacaatgttttaacaagaagcaatgttataaagttagtttcagtgcattatctacttgtgtagtcctatgcaataacagtagtgttacatgtatcaagcctagatgttttatacagatgccatatagtgttatgagccaggctgttgaatggaatttctcagtagcagcctacaactgaatagcaagtggcataaagcatatccattcagaatgaagtgccttaaatatagcagtagtcttttttggactagcactgactgaactgtaatgtaggggaaagtttcatgatggtatctatagtcaagacgaacatgtagcatggtgcctatgtagacaatataagagcttccaattttccttcagatatttttaatattaaatatattttagtgacagagtgccaacttctttcatcaggaaaccttattcaggagggtttttaaaaagtgtttaaatgtcaaatgtgaattggtgatgggtgatggagggttcagagaggagtgatcgtcagatgtgtgaatggacggtttaggtgaaaataatcaactgcatagttcccatgcacgctgggcaatgagaatccttggaaacattggtgatgctatcagttttatagctttatttcttaagggggtagggaaaattagttcccattctttcaacccccttaactgtatagctcttttcctagaatagtgacgcaaatctgcatgaacagctaattgtaccatagtgttcattgatacaatcatagcattgtctatttttctcttcatatttatatgggggggagggcgctggatgcaaaagttgaagatcgtgatgctatgatgttagttttccttagctgattttgagggtttttaaaaataaagcaaggttgactaacctacggccacgggaacaggaccatggttaagcaaccatatagaaagctttgttgaaagaaagtatggcatcttgtaccactgccctgactgtcacaactcctaaccttgccattgcctgcctccccctccccttctccttaagagacaatttctgcaggtggcaggtgagcaagcccaggagaatgctgcaatcttgggggtggttttatttatttcttttttgccaaatagagtgtggattcatttcaggggctagctaagccaagaggcagtggtttgggcttgttgtttgtaacaagaaaatgatccacaccactcccccgattcccgggtgcagaattgtaactcggggttgggcctctatatggagtgaccaaaatgccaaaattgtccatctgcctctgagtagggcaatggaaataccaaaccttctgactttgccaaaaagcatacaagcaacctggtcatacataggatgacaaaattctttctggttgtttttaaacaataaagcaataagaacaaatacaatacataggaagttaaaagcacaaaggaatgaacttattaatatttttgaaaaatgcactgggaaaaagttgatgtcaataacagtataaaacagccctatttcttgataaaaaatgacaaatgactgtctcttgcggatgcttggtactgtaatgttaataatagtcacctgctgttggatgcagcaataatttctgtatggtccatagcactgtatattatggatcgatattaatgtatccaatgaaataatcgacttgttcttgatagcctcattaaagcatttggtttttcacatag

SEQ ID NO: 384 - DNA, 4671 bp, Homo sapiens
agtgccagaactaactttgactttcactcttcgccaagggcttgcagaacaccttaaaggaaaaaagatggaggcgcttagagttcagatgttcatgccatgctcctttgaaagcttgtatctcagttccgccgagcatcctggggcctccaagcctccgataagctcctccagtatgacatcacgcatcttgctacgccagcaactcatgcgtgagcagatgcaggagcaggagcgcagggagcagcagcagaagctgcaggcggcccagttcatgcaacagagagtgcccgtgagtcagacaccagccataaacgtcagtgtgcccaccacccttccctctgccacgcaggtgccgatggaagtccttaaggtgcagacccacctcgaaaaccccaccaagtaccacatacagcaagcccaacggcagcaggtaaagcagtacctttctaccactttagcaaataaacatgccaaccaagtcctgagcttgccatgtccaaaccagcctggcgatcatgtcatgccaccggtgccggggagcagcgcacccaacagccccatggctatgcttacgcttaactccaactgtgaaaaagagggattttataagtttgaagagcaaaacagggcagagagcgagtgcccaggcatgaacacacattcacgagcgtcctgtatgcagatggatgatgtaatcgatgacatcattagcctagaatcaagttataatgaggaaatcttgggcttgatggatcctgctttgcaaatggcaaatacgttgcctgtctcgggaaacttgattgatctttatggaaaccaaggtctgcccccaccaggcctcaccatcagcaactcctgtccagccaaccttcccaacataaaaagggagctcacagagtctgaagcaagagcactggccaaagagaggcagaaaaaggacaatcacaacctgattgaacgaagaagaagatttaacataaatgaccgcattaaagaactaggtactttgattcccaagtcaaatgatccagacatgcgctggaacaagggaaccatcttaaaagcatccgtggactatatccgaaagttgcaacgagaacagcaacgcgcaaaagaacttgaaaaccgacagaagaaactggagcacgccaaccggcatttgttgctcagaatacaggaacttgaaatgcaggctcgagctcatggactttcccttattccatccacgggtctctgctctccagatttggtgaatcggatcatcaagcaagaacccgttcttgagaactgcagccaagacctccttcagcatcatgcagacctaacctgtacaacaactctcgatctcacggatggcaccatcaccttcaacaacaacctcggaactgggactgaggccaaccaagcctatagtgtccccacaaaaatgggatccaaactggaagacatcctgatggacgacaccctttctcccgtcggtgtcactgatccactcctttcctcagtgtcccccggagcttccaaaacaagcagccggaggagcagtatgagcatggaagagacggagcacacttgttagcgaatcctccctgcactgcattcgcacaaactgcttcctttcttgattcgtagatttaataacttacctgaaggggttttcttgataattttcctttaatatgaaattttttttcatgctttatcaatagcccaggatatattttatttttagaattttgtgaaacagacttgtatattctattttacaactacaaatgcctccaaagtattgtacaaataagtgtgcagtatctgtgaactgaattcaccacagactttagctttctgagcaagaggattttgcgtcagagaaatgtctgtccatttttattcaggggaaacttgatttgagatttttatgcctgtgacttccttggaaatcaaatgtaaagtttaattgaaagaatgtaaagcaaccaaaaagaaaaaaaaaaagaaagaaagaggaaaagaaatccatactaacccttttccattttataaatgtattgattcattggtactgccttaaagatacagtacccctctagctttgtttagtctttatactgcaaactatttaaagaaatatgtattctgtaaaagaaaaaaaaaatgcggccttttcatgaggatcgtctggttagaaaacataactgataccaaccgaaactgaagggagttagaccaaggctctgaaatataaagtctaatcttgctctcttttattctgtgctgttacagttttcttcatcaatgagtgtgatccagtttttcataagatattttattttgaaatggaaattaatgtcctctcaaagtaaaatattgaggagcactgaaagtatgttttactttttttttattttatttttgcttttgataagaaaaccgaactgggcatatttctaattggctttactatttttatttttaaattatgttttactgttcatttgatttgtacagattctttattatcattgttcttttcaatatatttgtattaatttgtaagaatatgcatcttaaaatggcaagttttccatatttttacaactcactggtggttttccgcattctttgtacacccatgaaagaaaacttttatgcaaggtcttgcatttaaaagacagctttgcgaatattttgtaaattacagtctcactcagaactgtttttggacacatttaaggtgtagtattaataggttaaaaccaggctttctagaaagaataaacttacatatttatttttaggacatgaaaatagcaatattcttggagattgataaccatagcattaatacgcccattatggtcatttaaattggggtttatttcagcaaacttgttgaatttatttttaagaaagaaatactgtattgggaagttactgttacttgataacaatgttttaacaagaagcaatgttataaagttagtttcagtgcattatctacttgtgtagtcctatgcaataacagtagtgttacatgtatcaagcctagatgttttatacagatgccatatagtgttatgagccaggctgttgaatggaatttctcagtagcagcctacaactgaatagcaagtggcataaagcatatccattcagaatgaagtgccttaaatatagcagtagtcttttttggactagcactgactgaactgtaatgtaggggaaagtttcatgatggtatctatagtcaagacgaacatgtagcatggtgcctatgtagacaatataagagcttccaattttccttcagatatttttaatattaaatatattttagtgacagagtgccaacttctttcatcaggaaaccttattcaggagggtttttaaaaagtgtttaaatgtcaaatgtgaattggtgatgggtgatggagggttcagagaggagtgatcgtcagatgtgtgaatggacggtttaggtgaaaataatcaactgcatagttcccatgcacgctgggcaatgagaatccttggaaacattggtgatgctatcagttttatagctttatttcttaagggggtagggaaaattagttcccattctttcaacccccttaactgtatagctcttttcctagaatagtgacgcaaatctgcatgaacagctaattgtaccatagtgttcattgatacaatcatagcattgtctatttttctcttcatatttatatgggggggagggcgctggatgcaaaagttgaagatcgtgatgctatgatgttagttttccttagctgattttgagggtttttaaaaataaagcaaggttgactaacctacggccacgggaacaggaccatggttaagcaaccatatagaaagctttgttgaaagaaagtatggcatcttgtaccactgccctgactgtcacaactcctaaccttgccattgcctgcctccccctccccttctccttaagagacaatttctgcaggtggcaggtgagcaagcccaggagaatgctgcaatcttgggggtggttttatttatttcttttttgccaaatagagtgtggattcatttcaggggctagctaagccaagaggcagtggtttgggcttgttgtttgtaacaagaaaatgatccacaccactcccccgattcccgggtgcagaattgtaactcggggttgggcctctatatggagtgaccaaaatgccaaaattgtccatctgcctctgagtagggcaatggaaataccaaaccttctgactttgccaaaaagcatacaagcaacctggtcatacataggatgacaaaattctttctggttgtttttaaacaataaagcaataagaacaaatacaatacataggaagttaaaagcacaaaggaatgaacttattaatatttttgaaaaatgcactgggaaaaagttgatgtcaataacagtataaaacagccctatttcttgataaaaaatgacaaatgactgtctcttgcggatgcttggtactgtaatgttaataatagtcacctgctgttggatgcagcaataatttctgtatggtccatagcactgtatattatggatcgatattaatgtatccaatgaaataatcgacttgttcttgatagcctcattaaagcatttggtttttcacatag

SEQ ID NO: 385 - DNA, 4680 bp, Homo sapiens
cagacctattccgctccatctctgaagtcaaatgggacaccttgaaaatacttcagtggttttcccacgagctattttctctctctgtgaaaaggaaaccaggaaattgactctgtgcctgttttcaagaagcagttccgccgagcatcctggggcctccaagcctccgataagctcctccagtatgacatcacgcatcttgctacgccagcaactcatgcgtgagcagatgcaggagcaggagcgcagggagcagcagcagaagctgcaggcggcccagttcatgcaacagagagtgcccgtgagtcagacaccagccataaacgtcagtgtgcccaccacccttccctctgccacgcaggtgccgatggaagtccttaaggtgcagacccacctcgaaaaccccaccaagtaccacatacagcaagcccaacggcagcaggtaaagcagtacctttctaccactttagcaaataaacatgccaaccaagtcctgagcttgccatgtccaaaccagcctggcgatcatgtcatgccaccggtgccggggagcagcgcacccaacagccccatggctatgcttacgcttaactccaactgtgaaaaagagggattttataagtttgaagagcaaaacagggcagagagcgagtgcccaggcatgaacacacattcacgagcgtcctgtatgcagatggatgatgtaatcgatgacatcattagcctagaatcaagttataatgaggaaatcttgggcttgatggatcctgctttgcaaatggcaaatacgttgcctgtctcgggaaacttgattgatctttatggaaaccaaggtctgcccccaccaggcctcaccatcagcaactcctgtccagccaaccttcccaacataaaaagggagctcacagagtctgaagcaagagcactggccaaagagaggcagaaaaaggacaatcacaacctgattgaacgaagaagaagatttaacataaatgaccgcattaaagaactaggtactttgattcccaagtcaaatgatccagacatgcgctggaacaagggaaccatcttaaaagcatccgtggactatatccgaaagttgcaacgagaacagcaacgcgcaaaagaacttgaaaaccgacagaagaaactggagcacgccaaccggcatttgttgctcagaatacaggaacttgaaatgcaggctcgagctcatggactttcccttattccatccacgggtctctgctctccagatttggtgaatcggatcatcaagcaagaacccgttcttgagaactgcagccaagacctccttcagcatcatgcagacctaacctgtacaacaactctcgatctcacggatggcaccatcaccttcaacaacaacctcggaactgggactgaggccaaccaagcctatagtgtccccacaaaaatgggatccaaactggaagacatcctgatggacgacaccctttctcccgtcggtgtcactgatccactcctttcctcagtgtcccccggagcttccaaaacaagcagccggaggagcagtatgagcatggaagagacggagcacacttgttagcgaatcctccctgcactgcattcgcacaaactgcttcctttcttgattcgtagatttaataacttacctgaaggggttttcttgataattttcctttaatatgaaattttttttcatgctttatcaatagcccaggatatattttatttttagaattttgtgaaacagacttgtatattctattttacaactacaaatgcctccaaagtattgtacaaataagtgtgcagtatctgtgaactgaattcaccacagactttagctttctgagcaagaggattttgcgtcagagaaatgtctgtccatttttattcaggggaaacttgatttgagatttttatgcctgtgacttccttggaaatcaaatgtaaagtttaattgaaagaatgtaaagcaaccaaaaagaaaaaaaaaaagaaagaaagaggaaaagaaatccatactaacccttttccattttataaatgtattgattcattggtactgccttaaagatacagtacccctctagctttgtttagtctttatactgcaaactatttaaagaaatatgtattctgtaaaagaaaaaaaaaatgcggccttttcatgaggatcgtctggttagaaaacataactgataccaaccgaaactgaagggagttagaccaaggctctgaaatataaagtctaatcttgctctcttttattctgtgctgttacagttttcttcatcaatgagtgtgatccagtttttcataagatattttattttgaaatggaaattaatgtcctctcaaagtaaaatattgaggagcactgaaagtatgttttactttttttttattttatttttgcttttgataagaaaaccgaactgggcatatttctaattggctttactatttttatttttaaattatgttttactgttcatttgatttgtacagattctttattatcattgttcttttcaatatatttgtattaatttgtaagaatatgcatcttaaaatggcaagttttccatatttttacaactcactggtggttttccgcattctttgtacacccatgaaagaaaacttttatgcaaggtcttgcatttaaaagacagctttgcgaatattttgtaaattacagtctcactcagaactgtttttggacacatttaaggtgtagtattaataggttaaaaccaggctttctagaaagaataaacttacatatttatttttaggacatgaaaatagcaatattcttggagattgataaccatagcattaatacgcccattatggtcatttaaattggggtttatttcagcaaacttgttgaatttatttttaagaaagaaatactgtattgggaagttactgttacttgataacaatgttttaacaagaagcaatgttataaagttagtttcagtgcattatctacttgtgtagtcctatgcaataacagtagtgttacatgtatcaagcctagatgttttatacagatgccatatagtgttatgagccaggctgttgaatggaatttctcagtagcagcctacaactgaatagcaagtggcataaagcatatccattcagaatgaagtgccttaaatatagcagtagtcttttttggactagcactgactgaactgtaatgtaggggaaagtttcatgatggtatctatagtcaagacgaacatgtagcatggtgcctatgtagacaatataagagcttccaattttccttcagatatttttaatattaaatatattttagtgacagagtgccaacttctttcatcaggaaaccttattcaggagggtttttaaaaagtgtttaaatgtcaaatgtgaattggtgatgggtgatggagggttcagagaggagtgatcgtcagatgtgtgaatggacggtttaggtgaaaataatcaactgcatagttcccatgcacgctgggcaatgagaatccttggaaacattggtgatgctatcagttttatagctttatttcttaagggggtagggaaaattagttcccattctttcaacccccttaactgtatagctcttttcctagaatagtgacgcaaatctgcatgaacagctaattgtaccatagtgttcattgatacaatcatagcattgtctatttttctcttcatatttatatgggggggagggcgctggatgcaaaagttgaagatcgtgatgctatgatgttagttttccttagctgattttgagggtttttaaaaataaagcaaggttgactaacctacggccacgggaacaggaccatggttaagcaaccatatagaaagctttgttgaaagaaagtatggcatcttgtaccactgccctgactgtcacaactcctaaccttgccattgcctgcctccccctccccttctccttaagagacaatttctgcaggtggcaggtgagcaagcccaggagaatgctgcaatcttgggggtggttttatttatttcttttttgccaaatagagtgtggattcatttcaggggctagctaagccaagaggcagtggtttgggcttgttgtttgtaacaagaaaatgatccacaccactcccccgattcccgggtgcagaattgtaactcggggttgggcctctatatggagtgaccaaaatgccaaaattgtccatctgcctctgagtagggcaatggaaataccaaaccttctgactttgccaaaaagcatacaagcaacctggtcatacataggatgacaaaattctttctggttgtttttaaacaataaagcaataagaacaaatacaatacataggaagttaaaagcacaaaggaatgaacttattaatatttttgaaaaatgcactgggaaaaagttgatgtcaataacagtataaaacagccctatttcttgataaaaaatgacaaatgactgtctcttgcggatgcttggtactgtaatgttaataatagtcacctgctgttggatgcagcaataatttctgtatggtccatagcactgtatattatggatcgatattaatgtatccaatgaaataatcgacttgttcttgatagcctcattaaagcatttggtttttcacatag

SEQ ID NO: 386 - DNA, 4472 bp, Homo sapiens
ctcgggataccttgtttatagtaccttctctttgccagtccatcttcaaattggaattatagaaagtagagggagggatagtctaccgtctctcactggattggtgccacctaaaacattgttatgctggaaatgctagaatataatcactatcaggtgcagacccacctcgaaaaccccaccaagtaccacatacagcaagcccaacggcagcaggtaaagcagtacctttctaccactttagcaaataaacatgccaaccaagtcctgagcttgccatgtccaaaccagcctggcgatcatgtcatgccaccggtgccggggagcagcgcacccaacagccccatggctatgcttacgcttaactccaactgtgaaaaagagggattttataagtttgaagagcaaaacagggcagagagcgagtgcccaggcatgaacacacattcacgagcgtcctgtatgcagatggatgatgtaatcgatgacatcattagcctagaatcaagttataatgaggaaatcttgggcttgatggatcctgctttgcaaatggcaaatacgttgcctgtctcgggaaacttgattgatctttatggaaaccaaggtctgcccccaccaggcctcaccatcagcaactcctgtccagccaaccttcccaacataaaaagggagctcacagcgtgtatttttcccacagagtctgaagcaagagcactggccaaagagaggcagaaaaaggacaatcacaacctgattgaacgaagaagaagatttaacataaatgaccgcattaaagaactaggtactttgattcccaagtcaaatgatccagacatgcgctggaacaagggaaccatcttaaaagcatccgtggactatatccgaaagttgcaacgagaacagcaacgcgcaaaagaacttgaaaaccgacagaagaaactggagcacgccaaccggcatttgttgctcagaatacaggaacttgaaatgcaggctcgagctcatggactttcccttattccatccacgggtctctgctctccagatttggtgaatcggatcatcaagcaagaacccgttcttgagaactgcagccaagacctccttcagcatcatgcagacctaacctgtacaacaactctcgatctcacggatggcaccatcaccttcaacaacaacctcggaactgggactgaggccaaccaagcctatagtgtccccacaaaaatgggatccaaactggaagacatcctgatggacgacaccctttctcccgtcggtgtcactgatccactcctttcctcagtgtcccccggagcttccaaaacaagcagccggaggagcagtatgagcatggaagagacggagcacacttgttagcgaatcctccctgcactgcattcgcacaaactgcttcctttcttgattcgtagatttaataacttacctgaaggggttttcttgataattttcctttaatatgaaattttttttcatgctttatcaatagcccaggatatattttatttttagaattttgtgaaacagacttgtatattctattttacaactacaaatgcctccaaagtattgtacaaataagtgtgcagtatctgtgaactgaattcaccacagactttagctttctgagcaagaggattttgcgtcagagaaatgtctgtccatttttattcaggggaaacttgatttgagatttttatgcctgtgacttccttggaaatcaaatgtaaagtttaattgaaagaatgtaaagcaaccaaaaagaaaaaaaaaaagaaagaaagaggaaaagaaatccatactaacccttttccattttataaatgtattgattcattggtactgccttaaagatacagtacccctctagctttgtttagtctttatactgcaaactatttaaagaaatatgtattctgtaaaagaaaaaaaaaatgcggccttttcatgaggatcgtctggttagaaaacataactgataccaaccgaaactgaagggagttagaccaaggctctgaaatataaagtctaatcttgctctcttttattctgtgctgttacagttttcttcatcaatgagtgtgatccagtttttcataagatattttattttgaaatggaaattaatgtcctctcaaagtaaaatattgaggagcactgaaagtatgttttactttttttttattttatttttgcttttgataagaaaaccgaactgggcatatttctaattggctttactatttttatttttaaattatgttttactgttcatttgatttgtacagattctttattatcattgttcttttcaatatatttgtattaatttgtaagaatatgcatcttaaaatggcaagttttccatatttttacaactcactggtggttttccgcattctttgtacacccatgaaagaaaacttttatgcaaggtcttgcatttaaaagacagctttgcgaatattttgtaaattacagtctcactcagaactgtttttggacacatttaaggtgtagtattaataggttaaaaccaggctttctagaaagaataaacttacatatttatttttaggacatgaaaatagcaatattcttggagattgataaccatagcattaatacgcccattatggtcatttaaattggggtttatttcagcaaacttgttgaatttatttttaagaaagaaatactgtattgggaagttactgttacttgataacaatgttttaacaagaagcaatgttataaagttagtttcagtgcattatctacttgtgtagtcctatgcaataacagtagtgttacatgtatcaagcctagatgttttatacagatgccatatagtgttatgagccaggctgttgaatggaatttctcagtagcagcctacaactgaatagcaagtggcataaagcatatccattcagaatgaagtgccttaaatatagcagtagtcttttttggactagcactgactgaactgtaatgtaggggaaagtttcatgatggtatctatagtcaagacgaacatgtagcatggtgcctatgtagacaatataagagcttccaattttccttcagatatttttaatattaaatatattttagtgacagagtgccaacttctttcatcaggaaaccttattcaggagggtttttaaaaagtgtttaaatgtcaaatgtgaattggtgatgggtgatggagggttcagagaggagtgatcgtcagatgtgtgaatggacggtttaggtgaaaataatcaactgcatagttcccatgcacgctgggcaatgagaatccttggaaacattggtgatgctatcagttttatagctttatttcttaagggggtagggaaaattagttcccattctttcaacccccttaactgtatagctcttttcctagaatagtgacgcaaatctgcatgaacagctaattgtaccatagtgttcattgatacaatcatagcattgtctatttttctcttcatatttatatgggggggagggcgctggatgcaaaagttgaagatcgtgatgctatgatgttagttttccttagctgattttgagggtttttaaaaataaagcaaggttgactaacctacggccacgggaacaggaccatggttaagcaaccatatagaaagctttgttgaaagaaagtatggcatcttgtaccactgccctgactgtcacaactcctaaccttgccattgcctgcctccccctccccttctccttaagagacaatttctgcaggtggcaggtgagcaagcccaggagaatgctgcaatcttgggggtggttttatttatttcttttttgccaaatagagtgtggattcatttcaggggctagctaagccaagaggcagtggtttgggcttgttgtttgtaacaagaaaatgatccacaccactcccccgattcccgggtgcagaattgtaactcggggttgggcctctatatggagtgaccaaaatgccaaaattgtccatctgcctctgagtagggcaatggaaataccaaaccttctgactttgccaaaaagcatacaagcaacctggtcatacataggatgacaaaattctttctggttgtttttaaacaataaagcaataagaacaaatacaatacataggaagttaaaagcacaaaggaatgaacttattaatatttttgaaaaatgcactgggaaaaagttgatgtcaataacagtataaaacagccctatttcttgataaaaaatgacaaatgactgtctcttgcggatgcttggtactgtaatgttaataatagtcacctgctgttggatgcagcaataatttctgtatggtccatagcactgtatattatggatcgatattaatgtatccaatgaaataatcgacttgttcttgatagcctcattaaagcatttggtttttcacatag

SEQ ID NO: 387 - DNA, 4454 bp, Homo sapiens
ctcgggataccttgtttatagtaccttctctttgccagtccatcttcaaattggaattatagaaagtagagggagggatagtctaccgtctctcactggattggtgccacctaaaacattgttatgctggaaatgctagaatataatcactatcaggtgcagacccacctcgaaaaccccaccaagtaccacatacagcaagcccaacggcagcaggtaaagcagtacctttctaccactttagcaaataaacatgccaaccaagtcctgagcttgccatgtccaaaccagcctggcgatcatgtcatgccaccggtgccggggagcagcgcacccaacagccccatggctatgcttacgcttaactccaactgtgaaaaagagggattttataagtttgaagagcaaaacagggcagagagcgagtgcccaggcatgaacacacattcacgagcgtcctgtatgcagatggatgatgtaatcgatgacatcattagcctagaatcaagttataatgaggaaatcttgggcttgatggatcctgctttgcaaatggcaaatacgttgcctgtctcgggaaacttgattgatctttatggaaaccaaggtctgcccccaccaggcctcaccatcagcaactcctgtccagccaaccttcccaacataaaaagggagctcacagagtctgaagcaagagcactggccaaagagaggcagaaaaaggacaatcacaacctgattgaacgaagaagaagatttaacataaatgaccgcattaaagaactaggtactttgattcccaagtcaaatgatccagacatgcgctggaacaagggaaccatcttaaaagcatccgtggactatatccgaaagttgcaacgagaacagcaacgcgcaaaagaacttgaaaaccgacagaagaaactggagcacgccaaccggcatttgttgctcagaatacaggaacttgaaatgcaggctcgagctcatggactttcccttattccatccacgggtctctgctctccagatttggtgaatcggatcatcaagcaagaacccgttcttgagaactgcagccaagacctccttcagcatcatgcagacctaacctgtacaacaactctcgatctcacggatggcaccatcaccttcaacaacaacctcggaactgggactgaggccaaccaagcctatagtgtccccacaaaaatgggatccaaactggaagacatcctgatggacgacaccctttctcccgtcggtgtcactgatccactcctttcctcagtgtcccccggagcttccaaaacaagcagccggaggagcagtatgagcatggaagagacggagcacacttgttagcgaatcctccctgcactgcattcgcacaaactgcttcctttcttgattcgtagatttaataacttacctgaaggggttttcttgataattttcctttaatatgaaattttttttcatgctttatcaatagcccaggatatattttatttttagaattttgtgaaacagacttgtatattctattttacaactacaaatgcctccaaagtattgtacaaataagtgtgcagtatctgtgaactgaattcaccacagactttagctttctgagcaagaggattttgcgtcagagaaatgtctgtccatttttattcaggggaaacttgatttgagatttttatgcctgtgacttccttggaaatcaaatgtaaagtttaattgaaagaatgtaaagcaaccaaaaagaaaaaaaaaaagaaagaaagaggaaaagaaatccatactaacccttttccattttataaatgtattgattcattggtactgccttaaagatacagtacccctctagctttgtttagtctttatactgcaaactatttaaagaaatatgtattctgtaaaagaaaaaaaaaatgcggccttttcatgaggatcgtctggttagaaaacataactgataccaaccgaaactgaagggagttagaccaaggctctgaaatataaagtctaatcttgctctcttttattctgtgctgttacagttttcttcatcaatgagtgtgatccagtttttcataagatattttattttgaaatggaaattaatgtcctctcaaagtaaaatattgaggagcactgaaagtatgttttactttttttttattttatttttgcttttgataagaaaaccgaactgggcatatttctaattggctttactatttttatttttaaattatgttttactgttcatttgatttgtacagattctttattatcattgttcttttcaatatatttgtattaatttgtaagaatatgcatcttaaaatggcaagttttccatatttttacaactcactggtggttttccgcattctttgtacacccatgaaagaaaacttttatgcaaggtcttgcatttaaaagacagctttgcgaatattttgtaaattacagtctcactcagaactgtttttggacacatttaaggtgtagtattaataggttaaaaccaggctttctagaaagaataaacttacatatttatttttaggacatgaaaatagcaatattcttggagattgataaccatagcattaatacgcccattatggtcatttaaattggggtttatttcagcaaacttgttgaatttatttttaagaaagaaatactgtattgggaagttactgttacttgataacaatgttttaacaagaagcaatgttataaagttagtttcagtgcattatctacttgtgtagtcctatgcaataacagtagtgttacatgtatcaagcctagatgttttatacagatgccatatagtgttatgagccaggctgttgaatggaatttctcagtagcagcctacaactgaatagcaagtggcataaagcatatccattcagaatgaagtgccttaaatatagcagtagtcttttttggactagcactgactgaactgtaatgtaggggaaagtttcatgatggtatctatagtcaagacgaacatgtagcatggtgcctatgtagacaatataagagcttccaattttccttcagatatttttaatattaaatatattttagtgacagagtgccaacttctttcatcaggaaaccttattcaggagggtttttaaaaagtgtttaaatgtcaaatgtgaattggtgatgggtgatggagggttcagagaggagtgatcgtcagatgtgtgaatggacggtttaggtgaaaataatcaactgcatagttcccatgcacgctgggcaatgagaatccttggaaacattggtgatgctatcagttttatagctttatttcttaagggggtagggaaaattagttcccattctttcaacccccttaactgtatagctcttttcctagaatagtgacgcaaatctgcatgaacagctaattgtaccatagtgttcattgatacaatcatagcattgtctatttttctcttcatatttatatgggggggagggcgctggatgcaaaagttgaagatcgtgatgctatgatgttagttttccttagctgattttgagggtttttaaaaataaagcaaggttgactaacctacggccacgggaacaggaccatggttaagcaaccatatagaaagctttgttgaaagaaagtatggcatcttgtaccactgccctgactgtcacaactcctaaccttgccattgcctgcctccccctccccttctccttaagagacaatttctgcaggtggcaggtgagcaagcccaggagaatgctgcaatcttgggggtggttttatttatttcttttttgccaaatagagtgtggattcatttcaggggctagctaagccaagaggcagtggtttgggcttgttgtttgtaacaagaaaatgatccacaccactcccccgattcccgggtgcagaattgtaactcggggttgggcctctatatggagtgaccaaaatgccaaaattgtccatctgcctctgagtagggcaatggaaataccaaaccttctgactttgccaaaaagcatacaagcaacctggtcatacataggatgacaaaattctttctggttgtttttaaacaataaagcaataagaacaaatacaatacataggaagttaaaagcacaaaggaatgaacttattaatatttttgaaaaatgcactgggaaaaagttgatgtcaataacagtataaaacagccctatttcttgataaaaaatgacaaatgactgtctcttgcggatgcttggtactgtaatgttaataatagtcacctgctgttggatgcagcaataatttctgtatggtccatagcactgtatattatggatcgatattaatgtatccaatgaaataatcgacttgttcttgatagcctcattaaagcatttggtttttcacatag

SEQ ID NO: 388 - DNA, 4286 bp, Homo sapiens
ctcgggataccttgtttatagtaccttctctttgccagtccatcttcaaattggaattatagaaagtagagggagggatagtctaccgtctctcactggattggtgccacctaaaacattgttatgctggaaatgctagaatataatcactatcaggtgcagacccacctcgaaaaccccaccaagtaccacatacagcaagcccaacggcagcagggattttataagtttgaagagcaaaacagggcagagagcgagtgcccaggcatgaacacacattcacgagcgtcctgtatgcagatggatgatgtaatcgatgacatcattagcctagaatcaagttataatgaggaaatcttgggcttgatggatcctgctttgcaaatggcaaatacgttgcctgtctcgggaaacttgattgatctttatggaaaccaaggtctgcccccaccaggcctcaccatcagcaactcctgtccagccaaccttcccaacataaaaagggagctcacagagtctgaagcaagagcactggccaaagagaggcagaaaaaggacaatcacaacctgattgaacgaagaagaagatttaacataaatgaccgcattaaagaactaggtactttgattcccaagtcaaatgatccagacatgcgctggaacaagggaaccatcttaaaagcatccgtggactatatccgaaagttgcaacgagaacagcaacgcgcaaaagaacttgaaaaccgacagaagaaactggagcacgccaaccggcatttgttgctcagaatacaggaacttgaaatgcaggctcgagctcatggactttcccttattccatccacgggtctctgctctccagatttggtgaatcggatcatcaagcaagaacccgttcttgagaactgcagccaagacctccttcagcatcatgcagacctaacctgtacaacaactctcgatctcacggatggcaccatcaccttcaacaacaacctcggaactgggactgaggccaaccaagcctatagtgtccccacaaaaatgggatccaaactggaagacatcctgatggacgacaccctttctcccgtcggtgtcactgatccactcctttcctcagtgtcccccggagcttccaaaacaagcagccggaggagcagtatgagcatggaagagacggagcacacttgttagcgaatcctccctgcactgcattcgcacaaactgcttcctttcttgattcgtagatttaataacttacctgaaggggttttcttgataattttcctttaatatgaaattttttttcatgctttatcaatagcccaggatatattttatttttagaattttgtgaaacagacttgtatattctattttacaactacaaatgcctccaaagtattgtacaaataagtgtgcagtatctgtgaactgaattcaccacagactttagctttctgagcaagaggattttgcgtcagagaaatgtctgtccatttttattcaggggaaacttgatttgagatttttatgcctgtgacttccttggaaatcaaatgtaaagtttaattgaaagaatgtaaagcaaccaaaaagaaaaaaaaaaagaaagaaagaggaaaagaaatccatactaacccttttccattttataaatgtattgattcattggtactgccttaaagatacagtacccctctagctttgtttagtctttatactgcaaactatttaaagaaatatgtattctgtaaaagaaaaaaaaaatgcggccttttcatgaggatcgtctggttagaaaacataactgataccaaccgaaactgaagggagttagaccaaggctctgaaatataaagtctaatcttgctctcttttattctgtgctgttacagttttcttcatcaatgagtgtgatccagtttttcataagatattttattttgaaatggaaattaatgtcctctcaaagtaaaatattgaggagcactgaaagtatgttttactttttttttattttatttttgcttttgataagaaaaccgaactgggcatatttctaattggctttactatttttatttttaaattatgttttactgttcatttgatttgtacagattctttattatcattgttcttttcaatatatttgtattaatttgtaagaatatgcatcttaaaatggcaagttttccatatttttacaactcactggtggttttccgcattctttgtacacccatgaaagaaaacttttatgcaaggtcttgcatttaaaagacagctttgcgaatattttgtaaattacagtctcactcagaactgtttttggacacatttaaggtgtagtattaataggttaaaaccaggctttctagaaagaataaacttacatatttatttttaggacatgaaaatagcaatattcttggagattgataaccatagcattaatacgcccattatggtcatttaaattggggtttatttcagcaaacttgttgaatttatttttaagaaagaaatactgtattgggaagttactgttacttgataacaatgttttaacaagaagcaatgttataaagttagtttcagtgcattatctacttgtgtagtcctatgcaataacagtagtgttacatgtatcaagcctagatgttttatacagatgccatatagtgttatgagccaggctgttgaatggaatttctcagtagcagcctacaactgaatagcaagtggcataaagcatatccattcagaatgaagtgccttaaatatagcagtagtcttttttggactagcactgactgaactgtaatgtaggggaaagtttcatgatggtatctatagtcaagacgaacatgtagcatggtgcctatgtagacaatataagagcttccaattttccttcagatatttttaatattaaatatattttagtgacagagtgccaacttctttcatcaggaaaccttattcaggagggtttttaaaaagtgtttaaatgtcaaatgtgaattggtgatgggtgatggagggttcagagaggagtgatcgtcagatgtgtgaatggacggtttaggtgaaaataatcaactgcatagttcccatgcacgctgggcaatgagaatccttggaaacattggtgatgctatcagttttatagctttatttcttaagggggtagggaaaattagttcccattctttcaacccccttaactgtatagctcttttcctagaatagtgacgcaaatctgcatgaacagctaattgtaccatagtgttcattgatacaatcatagcattgtctatttttctcttcatatttatatgggggggagggcgctggatgcaaaagttgaagatcgtgatgctatgatgttagttttccttagctgattttgagggtttttaaaaataaagcaaggttgactaacctacggccacgggaacaggaccatggttaagcaaccatatagaaagctttgttgaaagaaagtatggcatcttgtaccactgccctgactgtcacaactcctaaccttgccattgcctgcctccccctccccttctccttaagagacaatttctgcaggtggcaggtgagcaagcccaggagaatgctgcaatcttgggggtggttttatttatttcttttttgccaaatagagtgtggattcatttcaggggctagctaagccaagaggcagtggtttgggcttgttgtttgtaacaagaaaatgatccacaccactcccccgattcccgggtgcagaattgtaactcggggttgggcctctatatggagtgaccaaaatgccaaaattgtccatctgcctctgagtagggcaatggaaataccaaaccttctgactttgccaaaaagcatacaagcaacctggtcatacataggatgacaaaattctttctggttgtttttaaacaataaagcaataagaacaaatacaatacataggaagttaaaagcacaaaggaatgaacttattaatatttttgaaaaatgcactgggaaaaagttgatgtcaataacagtataaaacagccctatttcttgataaaaaatgacaaatgactgtctcttgcggatgcttggtactgtaatgttaataatagtcacctgctgttggatgcagcaataatttctgtatggtccatagcactgtatattatggatcgatattaatgtatccaatgaaataatcgacttgttcttgatagcctcattaaagcatttggtttttcacatag

SEQ ID NO: 389 - DNA, 4685 bp, Homo sapiens
aatttagccttcctagtgttgagagaaggtgcacgtaagcgtgtggcagaacgtctgcaatcgcatctttgtaataatctcctttctgagacggttcagtggactcaatgttccgccaaagggccaaggcagccctgcagttccgccgagcatcctggggcctccaagcctccgataagctcctccagtatgacatcacgcatcttgctacgccagcaactcatgcgtgagcagatgcaggagcaggagcgcagggagcagcagcagaagctgcaggcggcccagttcatgcaacagagagtgcccgtgagtcagacaccagccataaacgtcagtgtgcccaccacccttccctctgccacgcaggtgccgatggaagtccttaaggtgcagacccacctcgaaaaccccaccaagtaccacatacagcaagcccaacggcagcaggtaaagcagtacctttctaccactttagcaaataaacatgccaaccaagtcctgagcttgccatgtccaaaccagcctggcgatcatgtcatgccaccggtgccggggagcagcgcacccaacagccccatggctatgcttacgcttaactccaactgtgaaaaagagggattttataagtttgaagagcaaaacagggcagagagcgagtgcccaggcatgaacacacattcacgagcgtcctgtatgcagatggatgatgtaatcgatgacatcattagcctagaatcaagttataatgaggaaatcttgggcttgatggatcctgctttgcaaatggcaaatacgttgcctgtctcgggaaacttgattgatctttatggaaaccaaggtctgcccccaccaggcctcaccatcagcaactcctgtccagccaaccttcccaacataaaaagggagctcacagagtctgaagcaagagcactggccaaagagaggcagaaaaaggacaatcacaacctgattgaacgaagaagaagatttaacataaatgaccgcattaaagaactaggtactttgattcccaagtcaaatgatccagacatgcgctggaacaagggaaccatcttaaaagcatccgtggactatatccgaaagttgcaacgagaacagcaacgcgcaaaagaacttgaaaaccgacagaagaaactggagcacgccaaccggcatttgttgctcagaatacaggaacttgaaatgcaggctcgagctcatggactttcccttattccatccacgggtctctgctctccagatttggtgaatcggatcatcaagcaagaacccgttcttgagaactgcagccaagacctccttcagcatcatgcagacctaacctgtacaacaactctcgatctcacggatggcaccatcaccttcaacaacaacctcggaactgggactgaggccaaccaagcctatagtgtccccacaaaaatgggatccaaactggaagacatcctgatggacgacaccctttctcccgtcggtgtcactgatccactcctttcctcagtgtcccccggagcttccaaaacaagcagccggaggagcagtatgagcatggaagagacggagcacacttgttagcgaatcctccctgcactgcattcgcacaaactgcttcctttcttgattcgtagatttaataacttacctgaaggggttttcttgataattttcctttaatatgaaattttttttcatgctttatcaatagcccaggatatattttatttttagaattttgtgaaacagacttgtatattctattttacaactacaaatgcctccaaagtattgtacaaataagtgtgcagtatctgtgaactgaattcaccacagactttagctttctgagcaagaggattttgcgtcagagaaatgtctgtccatttttattcaggggaaacttgatttgagatttttatgcctgtgacttccttggaaatcaaatgtaaagtttaattgaaagaatgtaaagcaaccaaaaagaaaaaaaaaaagaaagaaagaggaaaagaaatccatactaacccttttccattttataaatgtattgattcattggtactgccttaaagatacagtacccctctagctttgtttagtctttatactgcaaactatttaaagaaatatgtattctgtaaaagaaaaaaaaaatgcggccttttcatgaggatcgtctggttagaaaacataactgataccaaccgaaactgaagggagttagaccaaggctctgaaatataaagtctaatcttgctctcttttattctgtgctgttacagttttcttcatcaatgagtgtgatccagtttttcataagatattttattttgaaatggaaattaatgtcctctcaaagtaaaatattgaggagcactgaaagtatgttttactttttttttattttatttttgcttttgataagaaaaccgaactgggcatatttctaattggctttactatttttatttttaaattatgttttactgttcatttgatttgtacagattctttattatcattgttcttttcaatatatttgtattaatttgtaagaatatgcatcttaaaatggcaagttttccatatttttacaactcactggtggttttccgcattctttgtacacccatgaaagaaaacttttatgcaaggtcttgcatttaaaagacagctttgcgaatattttgtaaattacagtctcactcagaactgtttttggacacatttaaggtgtagtattaataggttaaaaccaggctttctagaaagaataaacttacatatttatttttaggacatgaaaatagcaatattcttggagattgataaccatagcattaatacgcccattatggtcatttaaattggggtttatttcagcaaacttgttgaatttatttttaagaaagaaatactgtattgggaagttactgttacttgataacaatgttttaacaagaagcaatgttataaagttagtttcagtgcattatctacttgtgtagtcctatgcaataacagtagtgttacatgtatcaagcctagatgttttatacagatgccatatagtgttatgagccaggctgttgaatggaatttctcagtagcagcctacaactgaatagcaagtggcataaagcatatccattcagaatgaagtgccttaaatatagcagtagtcttttttggactagcactgactgaactgtaatgtaggggaaagtttcatgatggtatctatagtcaagacgaacatgtagcatggtgcctatgtagacaatataagagcttccaattttccttcagatatttttaatattaaatatattttagtgacagagtgccaacttctttcatcaggaaaccttattcaggagggtttttaaaaagtgtttaaatgtcaaatgtgaattggtgatgggtgatggagggttcagagaggagtgatcgtcagatgtgtgaatggacggtttaggtgaaaataatcaactgcatagttcccatgcacgctgggcaatgagaatccttggaaacattggtgatgctatcagttttatagctttatttcttaagggggtagggaaaattagttcccattctttcaacccccttaactgtatagctcttttcctagaatagtgacgcaaatctgcatgaacagctaattgtaccatagtgttcattgatacaatcatagcattgtctatttttctcttcatatttatatgggggggagggcgctggatgcaaaagttgaagatcgtgatgctatgatgttagttttccttagctgattttgagggtttttaaaaataaagcaaggttgactaacctacggccacgggaacaggaccatggttaagcaaccatatagaaagctttgttgaaagaaagtatggcatcttgtaccactgccctgactgtcacaactcctaaccttgccattgcctgcctccccctccccttctccttaagagacaatttctgcaggtggcaggtgagcaagcccaggagaatgctgcaatcttgggggtggttttatttatttcttttttgccaaatagagtgtggattcatttcaggggctagctaagccaagaggcagtggtttgggcttgttgtttgtaacaagaaaatgatccacaccactcccccgattcccgggtgcagaattgtaactcggggttgggcctctatatggagtgaccaaaatgccaaaattgtccatctgcctctgagtagggcaatggaaataccaaaccttctgactttgccaaaaagcatacaagcaacctggtcatacataggatgacaaaattctttctggttgtttttaaacaataaagcaataagaacaaatacaatacataggaagttaaaagcacaaaggaatgaacttattaatatttttgaaaaatgcactgggaaaaagttgatgtcaataacagtataaaacagccctatttcttgataaaaaatgacaaatgactgtctcttgcggatgcttggtactgtaatgttaataatagtcacctgctgttggatgcagcaataatttctgtatggtccatagcactgtatattatggatcgatattaatgtatccaatgaaataatcgacttgttcttgatagcctcattaaagcatttggtttttcacatag

SEQ ID NO: 390 - DNA, 1108 bp, Homo sapiens
ctcgggataccttgtttatagtaccttctctttgccagtccatcttcaaattggaattatagaaagtagagggagggatagtctaccgtctctcactggattggtgccacctaaaacattgttatgctggaaatgctagaatataatcactatcaggtgcagacccacctcgaaaaccccaccaagtaccacatacagcaagcccaacggcagcaggtaaagcagtacctttctaccactttagcaaataaacatgccaaccaagtcctgagcttgccatgtccaaaccagcctggcgatcatgtcatgccaccggtgccggggagcagcgcacccaacagccccatggctatgcttacgcttaactccaactgtgaaaaagagtttatgaagcagtgagaatgcagagagaggagaaggggaggtggaaaaggaaaagcaaaaatagaagaggtgtgggacatgctgtttagaagttccgcttgttgtgaatgtctggaatattatttttatttctccctgagttgggggaagaaagaatggaatatgcatggatggatttgaatcatatagcacatgagactttaacggaaacgcaaaggtttaattgctggatacattctgtttcataataaaattgccactgcccgttaaatctgctttggtgaaggctggattggaaacaagactcaaactaccttcaagctaattggtgcatcaaaatttgcagcatacaaatacctgagagctgtgatttaatgctcattatttccaaattatgagatgatgagcttcatctcaatgggatttaccgtactatggactatgaagtgtttatgcaaattcggaggcaacttttctagagttggattgattttaatttctagagggactaaaatctttgcccctatgcccaaaccaactgctttatttttctctacccaaatttgtcatctagcaagatgatttgacacaagttcttccttcattatttcatcttttggtcagattccactttgtttgaaagcttagttcatcttgttgctgtgccatcagctttgtgtgaacaggtcattaaaaagtcatttgcaaatccaaaaaaaaaaaa

SEQ ID NO: 391 - DNA, 1500 bp, Homo sapiens
aggactggggatttcaactctgagtcttatacctttaaatgccactgtaactctatactgcctccctgatgcctcaaaacacttttgaaaagaaggaacacgtcctactggagctaatcagagggaagaactagaagtacaaatgagccacaacggagagttttaaaattctcttccctaagtgagttccgggaagctcgggaaggggtggacacttgtacagttcacttgtacatcttcactcctgaaatgctaggacaaatctcatttgaactcccagtcaactgagaaattaaaagcagagagcaacgacgctattttgtaactttgtgccttttaaaattaaccgaatctttcaattgctgctgtagattagaagtggctacttggataaaggggaaagagccattcaactgatgaatactattgtaaaagtccagacttagttctagaaaaggaacgcacaagaacaatttctccaataacgttttcattacagagcgaaggaaagttcttcctcgttgttccaatccgaggacaagctgatatgtcgcagcagcccagggaagcatgcgagctgataggaagtccttttattttaagacaggctcgaatgctaaaactttcttgtgccaaaacccttgactattttatttttaaaataagcacttggcgtgccctcgcagatgtctgagctgagaggtcggggcgatggtagaagagcagtcagtgtccattcttattcatattaagtagccaagtctgtacccttgaagcaagtggggagagaggagggagaggagctgctgacattgacaatgaatccaaacaggagttgcactagcggtgtccaccacgttgcctctcccccgcctggccttctgggagctgtagttttcgtgggagcggctccccaggcgagctgggaatgccccgcccgggccgaactacagatcccaggcggcgctcggccgccagcccctcccgcccgggtgcgagtgtaaactccccgcgctggggcgggcggccgcgagccggcgagcgggcagagctcggcactgcgccggggcgcacggctcgggggacccaggcccagctaccttccctccgcccccgggctctgttctcactttccagcagtggaaggacgggaagcgggagccatgcagtccgaatcggggatcgtgccggatttcgaagtcggggaggagtttcatgaagagcccaaaacctattacgaactcaaaagtcaaccgctgaagagcaggtgagtggtgacagctgggcagaggcgcaccgggcggctggggggcactgcgtctgccactctggggcgaggagagcgggtcgcgggagctctgggacaaggacccagtgcccttgccccggagcagagggcgaactgcccctcgcagttgggggccgcgcctgcccggcccaagtgcgcctttaggaagctcggatggagcgcacttcgcgggggcgcggcgggtcgccggg

SEQ ID NO: 392 - DNA, 1267 bp, Homo sapiens
gcgaaggaaagttcttcctcgttgttccaatccgaggacaagctgatatgtcgcagcagcccagggaagcatgcgagctgataggaagtccttttattttaagacaggctcgaatgctaaaactttcttgtgccaaaacccttgactattttatttttaaaataagcacttggcgtgccctcgcagatgtctgagctgagaggtcggggcgatggtagaagagcagtcagtgtccattcttattcatattaagtagccaagtctgtacccttgaagcaagtggggagagaggagggagaggagctgctgacattgacaatgaatccaaacaggagttgcactagcggtgtccaccacgttgcctctcccccgcctggccttctgggagctgtagttttcgtgggagcggctccccaggcgagctgggaatgccccgcccgggccgaactacagatcccaggcggcgctcggccgccagcccctcccgcccgggtgcgagtgtaaactccccgcgctggggcgggcggccgcgagccggcgagcgggcagagctcggcactgcgccggggcgcacggctcgggggacccaggcccagctaccttccctccgcccccgggctctgttctcactttccagcagtggaaggacgggaagcgggagccatgcagtccgaatcggggatcgtgccggatttcgaagtcggggaggagtttcatgaagagcccaaaacctattacgaactcaaaagtcaaccgctgaagagcaggtgagtggtgacagctgggcagaggcgcaccgggcggctggggggcactgcgtctgccactctggggcgaggagagcgggtcgcgggagctctgggacaaggacccagtgcccttgccccggagcagagggcgaactgcccctcgcagttgggggccgcgcctgcccggcccaagtgcgcctttaggaagctcggatggagcgcacttcgcgggggcgcggcgggtcgccggggacgaagcgtccaggcgcggggaccctcggccgaggatgccagctgctgagactgattgggggctggggagcgacctggcgcgatgtgggggaggaggagcgccgggccgggacgctgtcccggtgggatgggggagaaagagttctagtgaaccccctttctgaagatcccagcgggttgagggctcggagagggagagctttgggtggactgagatgcgacattggagggaagcaattagttcgcttggagtcacctcttgggag

SEQ ID NO: 393 - DNA, 1250 bp, Homo sapiens
tcttggcaaagctcaccttttctttaatcaatatttgttagtaaacattttaggcatcttcaaagaacttagataacatgtaggagtagttatttggttagattcagttatacaaaaaagcaaatcaagcaatttatttttaaatgtggaaatttgggtgccattaagatgctttgcttcttggcagtgcatatggtggcgctatatttggtggtgatgagtagtgtgcagcataaaatgtaaaaaaaaaaaaattaaaaaaattaagccgcctgataaaaatgccttgatgcaatcaagctgacttattttaattcaactactaatgacttaaatcctgtcacctcttgattttcaattatgtggagtaccattctgtgacttgattatatttgcgcagactcattttatagtttggtgcaatttaggatacccccaaagtgcaaacgaagggtctcattaggaaactaaatgttgtatgcattttggttttcccacagcagttccgccgagcatcctggggcctccaagcctccgataagctcctccagtatgacatcacgcatcttgctacgccagcaactcatgcgtgagcagatgcaggagcaggagcgcagggagcagcagcagaagctgcaggcggcccagttcatgcaacagagagtgcccgtgagtcagacaccagccataaacgtcagtgtgcccaccacccttccctctgccacgcaggtgccgatggaagtccttaaggtacgtgagtgttgctcttgttggttggaccaaactctcttccattttccatttgctaggtgttttgtttatctgaatatgtattttgttagactgacccttcagaattatatttgaaaactccaactcccttaattcttacgtggctttatattttaaaagaaggatgcaaacgcattgtaactgtaatagtaacaatcagtaaatggtgggagtcaatgttccatgagaaattgcaagtaggaatacatgtttgttgtgatgacatctttctttgggaaagtttcaaaaccagaattatctgaggtgggcctcttctgataatttgtgtatcttaaatatttttctcttaaataccttccatagccactctttacttttctttttatttagtatgtaatattggttgtaaaatctgactgttttagagagctcttcacatataagattgaagaagagctttctgcgctttgataaccagactacataatccttttact

SEQ ID NO: 394 - DNA, 1228 bp, Homo sapiens
tatttattttctacagccattttacacagttggttcttaaggaggtgtgtgtgtgtgtgtgtgtgtgtgtgtgtgtgtgtgtgttttaaaaagaaagctgttctgttcgccaaggaaagtgaaacaaacaattatgccacttctacattgttgtttgatcttaataaaccctttcatgtgtgttggggaaatttttgccctaagataatttcaaacttttaattattagatatgagaagaaggatacaaggtttgaaagagacgtatagttaattagcagggaaataaaatagggcaaagtattacaccaaatcctactagttagactttaaacttcagtaatatcaaaatccgttagcacagtgcctggtacataacaaaggcttaataatttattctgttggtggcctggtcagtttcatgtttgtgcctgaaggaagagccgtctgaaactcacaaataacagcgctgttttcttttccctccatggctatgttcaggtgcagacccacctcgaaaaccccaccaagtaccacatacagcaagcccaacggcagcaggtaaagcagtacctttctaccactttagcaaataaacatgccaaccaagtcctgagcttgccatgtccaaaccagcctggcgatcatgtcatgccaccggtgccggggagcagcgcacccaacagccccatggctatgcttacgcttaactccaactgtgaaaaagaggtaattcatgtctcctctcctctcctgttttcttatgctaaataacttgtctgttgaatatgattcccacacttaactgtggactctagtttgtccttgtggccacatttaccagcctttgtccccgattcaccatcgtggctgtggcattccagcctgttgtctccatcgctgggttattgggtgtagagcacatgacgggagacctggccctctccaagtgaaatgtggaggcgaggacacttttgccacttgcttcttcttccttagctgagtgctctcttctcttccatgcctttcagtttatgaagcagtgagaatgcagagagaggagaaggggaggtggaaaaggaaaagcaaaaatagaagaggtgtgggacatgctgtttagaagttccgcttgttgtgaatgtctggaatattatttttatttctccctgagttgggggaagaaagaatggaatatgcatggatggatttgaatcatatagcacatgaga

SEQ ID NO: 395 - DNA, 1084 bp, Homo sapiens
aataaaattgccactgcccgttaaatctgctttggtgaaggctggattggaaacaagactcaaactaccttcaagctaattggtgcatcaaaatttgcagcatacaaatacctgagagctgtgatttaatgctcattatttccaaattatgagatgatgagcttcatctcaatgggatttaccgtactatggactatgaagtgtttatgcaaattcggaggcaacttttctagagttggattgattttaatttctagagggactaaaatctttgcccctatgcccaaaccaactgctttatttttctctacccaaatttgtcatctagcaagatgatttgacacaagttcttccttcattatttcatcttttggtcagattccactttgtttgaaagcttagttcatcttgttgctgtgccatcagctttgtgtgaacaggtcattaaaaagtcatttgcaaatccaagttatagactgtttttgcttgtgtttttgcagggattttataagtttgaagagcaaaacagggcagagagcgagtgcccaggcatgaacacacattcacgagcgtcctgtatgcaggtactgaatgacttggcagcctgaggatgaacactttgtaatgagaatctatatttgtggtggatcacaccttcctgaaaacttaagcatttttttcccccattgttttttttttttttatagagaaagctaggaacattgccattttcctcatagtatctcatgattaaataatgacaagggagaataaactaaaatgtgtttttcccctaagttgctgcaaagattaaaaacttcttaaagtacataaattttaataagatatgaaatatgtactttaacataatccatatatgttatacaaatttgtaggttagcaatttttgtattagtaaaaccaagatgtgtgtgtataatctagatattgtttcctaaatggaatctcatggaacatacattttgaaactatattaatttaataacatataatggatgctttcccaaataactaaagtttcttctactacatcctatttaatggatatataaattatgctata

SEQ ID NO: 396 - DNA, 1096 bp, Homo sapiens
aaaaaggaagtagaatgacagctgtcattcaagatgaagtgctgtggtacatctctcctgtttagggcaggcagtttagcatagttgtgaaagcatgggttaaattgtggctccagtctttcttcagtgtgtgactttgggcaagctgcttctcatttatttcacctggaaaattgctataataatagtacctgccatgatacggttttcgttagggcaaaatcttagcctatgaaaatcctcgaacccaatgcttggcaactcataatcactcattaaatgctggctacaagtattatcctcatcacctattcgtgttaatggtcttcaatactattttatacttcaatactattttagtggaaagaggacagttacttcttagaatctaactaaagaccattattgctttgggtaaaaaaagaccatgagtctctttttaggttgtgttgcatagtttatttatttttgtctctcttctcttaccctttttcctacagatggatgatgtaatcgatgacatcattagcctagaatcaagttataatgaggaaatcttgggcttgatggatcctgctttgcaaatggcaaatacggtattgataacctttttttaagtagaaaatcttgaggtgtttccagggttcttttcttttttcttaaacttttattttatctttgtaactggttcactgattaaatgtattaatagtaaaatggagaattatctcaggatcacaaataagtgactttaacatcagaaattaagaagtttttatgagtttatgaataatcccatgataaaactctacattccctggagtccacgagcagttttgatagggcattagcccttccaattcccttgacatctaatgcccaacccagtacactgcagccaagggaaccattgtgaactgcactattcacagtggtgctctagttggcctgaaaaagttggttcagtttttcaagaaggttttctcatattcttaggtgatagagggacattggagttacccttctccaacagcaaaatctattccaacctcagttcataaacaagtggtcctatttgctattgtatgttacttgt

SEQ ID NO: 397 - DNA, 1118 bp, Homo sapiens
aaaaaaaactttcattgcttttccttgtaaaagaaaaagtgagaagaagaggtggatacgagaaggaaggaacaaaattaactttaatggaaagtcctatttggtgaaaaggtcattttatatacaatcctgttttacaataatagccaacatttcctgaacacccactgtttgctactagttgtactagataatgcattcaccacattattcattgcctccatgctcaaaataaactgactggctagttagagtagtcattttatgggtgtgagactgtactttcctgcctcaaagggaactggttgaggagatcctgtacctctcttttaatacctgtgaatgaaaaagtaaacatctcatattttcctattttaaaaatgattttttgtatcaaataatttttcttaaataaatcctagagtaggatataggttttatctgaaaaaacatgggaattgttcaacagttaatttctgttactgtttgtctctctctagttgcctgtctcgggaaacttgattgatctttatggaaaccaaggtctgcccccaccaggcctcaccatcagcaactcctgtccagccaaccttcccaacataaaaagggagctcacaggtaaacacctagtaaatgtgcctcttactgcagatttctgtccatttcctgataagacaaagttattgatatagtgatgtgcaaactatatccaactcatggacgtaacttttataggtctctgcagtggttaaaacattatgcaatattttaagacggagaatttatacttgaaaattctgttttttttcaaggagatccttgaaaatctcctgagatactgggaatcggggccaccattactgcatgtcaccaatcactgtgtgtgtggtgaaggtcccctttgtgttggggatagtaggcaactctttcagctgtaactgtctccaccctacctgatatgtatgtttctaacaagcccctagaggcatttgcatttgagaacccagatctgaattttcctttgacacacattcaagcccacaattgggatagcataagaatatatttctcacatcttcagatgcctcctgttgtcttttgctgtattgtgtgcaaaa

SEQ ID NO: 398 - DNA, 1057 bp, Homo sapiens
tccacttcccaaagtgctggaattacaggtgcaagcaaccatgctgggccactactcagtttttatatcagcacgttacacaggcatcaaaaaaggattgaaagcttctatggcctgaaaagaaaatatatcagacccctgataatagagtatcaacagcaaattgacatagttttctaattatcgatttctttcttgctagtatctgtatatgtttacagtgtgctatatataatttttaccagggtttttttttaccattttgtggaagcccagtttttacatattgtatatatgatatatatattgcttttgaaaacatgcaagctttttaaaaagatatcatttttaaaaaaacgtatttttacttagagtcaagtcaaataagcttctgtatgtttgggaaatgagatattttgtagtttacattttgtgcaacttcaaacagttccaacttctaatgacttcattcacgtgcacagcgtgtatttttcccacagagtctgaagcaagagcactggccaaagagaggcagaaaaaggacaatcacaacctgagtaagttggttttatttatgttcatgacatttgatattaatgttccccatatatcaaaaatgtttccagaaattctgtagaggagagttgattcctacagctgttaaaattctctcttatggaagaaaattgtatttgacagaaaccaaggtatatattttccccatattttatctcagatcaaattgaattttgtatatatacttattttcagtttctgaagagtttttatttttcttgtttctagtagtggttttctctctctctctctctctttttggtaagagggagaattgatccccaactacccaattataagtgttgctcacactggaacttattaacaaaaggggattagggaagcaccttctccaatgagatttgaaagaaaaagaaagaaagaaacagatctgaaggggagtaaatggatgaggcagcctcctaaatttctgacatgattcgtgacttaaaaaaaatagccctaaagcatttaaaatatt

SEQ ID NO: 399 - DNA, 1076 bp, Homo sapiens
gtcagtaaaaaatgtgtggaaatttgttttccctccgcttaagtaaatatctgcataatatcctcaattttgctacttatcccacaaagccagaagtactaacttcctggctctttgcagaaagtttgctgacttctgctctaaggggttaggttagaatttgggctttcaccagatattgttggatgtcctcgccaagtccctaataacagtatctccaaggcaatttcattatttgtaactaaggatagtaactgatttcagggttgttataagaacaaatgagaaatcgtctgtatctaagggctttggaaatggtaaagaaatgtagctcatttttaactgcaataccaagaacatagtaaaaatagggaaaaagtaggttcaggtttccgttgtcatgacctggagaagttaatatgcacatgcctttaatgagatgtgctaaatgcatacatggcactgttactaatagcctttcctgtgctcttttcttgaagttgaacgaagaagaagatttaacataaatgaccgcattaaagaactaggtactttgattcccaagtcaaatgatccgtgagtacaatcgcgtgttaatctgcatcatatatttttcgtacctgaatgttttttcatacgttgtaaaaaatgcagttgtaaaaactaaagtaaagaagtctcccctctccctttggttctattcctaaattcttcttacacctttcttttggttagtctcatcaagctaaaatttcaagacaaaagcattgaattgtgcaaaaggattgttggacactagatgttttggttgtgaggaggtggctttctgaaacctaagaattctttgcaaacaaatactgagcttaaaaaaaatttcctttaatggttcatgcagaacagaactttcaatagttgttaaagctagatttgttgactgtttgctctttgacttgtacagtacctctaaataggcactgatgaacagacattagagacttaaagtttaatgatactccacagacaaaaagggtcaattatttttatgaaaacttgcctactctttgtatgttttacca

SEQ ID NO: 400 - DNA, 1148 bp, Homo sapiens
tagtactgtgtggcctaggacaagttgaattgtgtctgtttcaacatgtgcacagtctctctcttacaaggtgcttgtctgggttaagtaagacaatgtgtacaaactgggtgggcaacactaggcacgtggcaaacactcgtgaatggcagctataattaatgtatgattattttatttttaaaattgaatgcttttaaaaatgatacaatggactttggggacttgcggggaagggagggagggggtgggatgggggtgagggataaaagcctacacgttgggtacagtgtacacggcttgggtggtgggtgtaccaaaatcgcaaaaatcaccactaaagaacttatccatgtaaccaagcaccacctgttcccccaaaactattgaaataaaaaaaaattttaaaaagttcaaaaagaaatggagtgctttgaatattgaattttcattgagcctcaaatcctaaaaatatctgttttcctccattttcatcgcagagacatgcgctggaacaagggaaccatcttaaaagcatccgtggactatatccgaaagttgcaacgagaacagcaacgcgcaaaagaacttgaaaaccgacagaagaaactggagcacgccaaccggcatttgttgctcagaatacaggtacgcagcctgagttgtgtaaagtttactgctttttaccgacttcaagacagtagaaacagggatataatgagccataggggagttgacttacgtgatcctaacacagtcaatccttattatttgtggattctgtgtgtgtgaatttgcctacttgtaaccccaaagtcagtatctgtggcacttccacagtcattcttggacatgtgcagagtggcacgtttgagctgcccatggcacgcatttccaggtgaggtcgaatgaccctgcctgaggttgactgtctgctgtcttgtttcagctctcatcctctaaacaagtgctcctttcgtggtctgttgagtactttctacatttttgtggtttctgttggtgatttcgctgtttaaaatgacccccaagcataatgctaaagcactgtctagagttcctgagggcaagaaggccgtgatgtgcttacagagaaaatacatgtgttggataagcttcgttcaggcatg

SEQ ID NO: 401 - DNA, 4491 bp, Homo sapiens
tacataatcaaatctataaaacacctaaaaatttatttcacatactgccagtggtacttctcctatactttagaacatacagagctcattaatttaaaagaacaaaaaacttttattttgaggatttattgttttccaagtatctgatttttaaaaatagactttatttttcaggacagtttttggttcacagtaaaattgaaatgaagctgcagatatttcccatacacctcattcccccaagcacgcacagccttccccattatcaacattccctaccagagtggcacatttattagaatcaatgaacccgcagtgacatttcattatcctccaaagtctatactttacattccctctggtattgtacattttgtgggtttggccaaatgtctaatgacgcgcatctaccattatagtatcatatagagtggtttcacaggcttaaaagtcctctgtgctctgcctatttcagtgttttatctttactcttattataggaacttgaaatgcaggctcgagctcatggactttcccttattccatccacgggtctctgctctccagatttggtgaatcggatcatcaagcaagaacccgttcttgagaactgcagccaagacctccttcagcatcatgcagacctaacctgtacaacaactctcgatctcacggatggcaccatcaccttcaacaacaacctcggaactgggactgaggccaaccaagcctatagtgtccccacaaaaatgggatccaaactggaagacatcctgatggacgacaccctttctcccgtcggtgtcactgatccactcctttcctcagtgtcccccggagcttccaaaacaagcagccggaggagcagtatgagcatggaagagacggagcacacttgttagcgaatcctccctgcactgcattcgcacaaactgcttcctttcttgattcgtagatttaataacttacctgaaggggttttcttgataattttcctttaatatgaaattttttttcatgctttatcaatagcccaggatatattttatttttagaattttgtgaaacagacttgtatattctattttacaactacaaatgcctccaaagtattgtacaaataagtgtgcagtatctgtgaactgaattcaccacagactttagctttctgagcaagaggattttgcgtcagagaaatgtctgtccatttttattcaggggaaacttgatttgagatttttatgcctgtgacttccttggaaatcaaatgtaaagtttaattgaaagaatgtaaagcaaccaaaaagaaaaaaaaaaagaaagaaagaggaaaagaaatccatactaacccttttccattttataaatgtattgattcattggtactgccttaaagatacagtacccctctagctttgtttagtctttatactgcaaactatttaaagaaatatgtattctgtaaaagaaaaaaaaaatgcggccttttcatgaggatcgtctggttagaaaacataactgataccaaccgaaactgaagggagttagaccaaggctctgaaatataaagtctaatcttgctctcttttattctgtgctgttacagttttcttcatcaatgagtgtgatccagtttttcataagatattttattttgaaatggaaattaatgtcctctcaaagtaaaatattgaggagcactgaaagtatgttttactttttttttattttatttttgcttttgataagaaaaccgaactgggcatatttctaattggctttactatttttatttttaaattatgttttactgttcatttgatttgtacagattctttattatcattgttcttttcaatatatttgtattaatttgtaagaatatgcatcttaaaatggcaagttttccatatttttacaactcactggtggttttccgcattctttgtacacccatgaaagaaaacttttatgcaaggtcttgcatttaaaagacagctttgcgaatattttgtaaattacagtctcactcagaactgtttttggacacatttaaggtgtagtattaataggttaaaaccaggctttctagaaagaataaacttacatatttatttttaggacatgaaaatagcaatattcttggagattgataaccatagcattaatacgcccattatggtcatttaaattggggtttatttcagcaaacttgttgaatttatttttaagaaagaaatactgtattgggaagttactgttacttgataacaatgttttaacaagaagcaatgttataaagttagtttcagtgcattatctacttgtgtagtcctatgcaataacagtagtgttacatgtatcaagcctagatgttttatacagatgccatatagtgttatgagccaggctgttgaatggaatttctcagtagcagcctacaactgaatagcaagtggcataaagcatatccattcagaatgaagtgccttaaatatagcagtagtcttttttggactagcactgactgaactgtaatgtaggggaaagtttcatgatggtatctatagtcaagacgaacatgtagcatggtgcctatgtagacaatataagagcttccaattttccttcagatatttttaatattaaatatattttagtgacagagtgccaacttctttcatcaggaaaccttattcaggagggtttttaaaaagtgtttaaatgtcaaatgtgaattggtgatgggtgatggagggttcagagaggagtgatcgtcagatgtgtgaatggacggtttaggtgaaaataatcaactgcatagttcccatgcacgctgggcaatgagaatccttggaaacattggtgatgctatcagttttatagctttatttcttaagggggtagggaaaattagttcccattctttcaacccccttaactgtatagctcttttcctagaatagtgacgcaaatctgcatgaacagctaattgtaccatagtgttcattgatacaatcatagcattgtctatttttctcttcatatttatatgggggggagggcgctggatgcaaaagttgaagatcgtgatgctatgatgttagttttccttagctgattttgagggtttttaaaaataaagcaaggttgactaacctacggccacgggaacaggaccatggttaagcaaccatatagaaagctttgttgaaagaaagtatggcatcttgtaccactgccctgactgtcacaactcctaaccttgccattgcctgcctccccctccccttctccttaagagacaatttctgcaggtggcaggtgagcaagcccaggagaatgctgcaatcttgggggtggttttatttatttcttttttgccaaatagagtgtggattcatttcaggggctagctaagccaagaggcagtggtttgggcttgttgtttgtaacaagaaaatgatccacaccactcccccgattcccgggtgcagaattgtaactcggggttgggcctctatatggagtgaccaaaatgccaaaattgtccatctgcctctgagtagggcaatggaaataccaaaccttctgactttgccaaaaagcatacaagcaacctggtcatacataggatgacaaaattctttctggttgtttttaaacaataaagcaataagaacaaatacaatacataggaagttaaaagcacaaaggaatgaacttattaatatttttgaaaaatgcactgggaaaaagttgatgtcaataacagtataaaacagccctatttcttgataaaaaatgacaaatgactgtctcttgcggatgcttggtactgtaatgttaataatagtcacctgctgttggatgcagcaataatttctgtatggtccatagcactgtatattatggatcgatattaatgtatccaatgaaataatcgacttgttcttgatagcctcattaaagcatttggtttttcacatagtggtggcctattgtgttaatgccaattttgaatgctatctgccatatcaaaaaatggtagtgcacattttcttctgatttaatgaataacaaattgcatgaaaatttagaaaatgccagtaagtactttttttgtttaaaatgccactctaagatgttactttttggttttaaacatttttgattactttttgacttacactcagatgaggtgtaattatgcaccttttttatccccctctgaatttggggagattttaaactcccaaatgccaagacttcattttagatataggagttttatttaaaatgtttcattgagaggtggctttaaaaaagagaaattgtcagagaaacccttgcatatttacagaaaagatattgggtttttaaaatacaaatttacaataatgaaagcttaatatacccaggctgccagctcctggttgccttttttttttaatacactacttaagaatcatttgataaatgttggatttg

SEQ ID NO: 402 - DNA, 1500 bp, Homo sapiens
gtgcagaattgtaactcggggttgggcctctatatggagtgaccaaaatgccaaaattgtccatctgcctctgagtagggcaatggaaataccaaaccttctgactttgccaaaaagcatacaagcaacctggtcatacataggatgacaaaattctttctggttgtttttaaacaataaagcaataagaacaaatacaatacataggaagttaaaagcacaaaggaatgaacttattaatatttttgaaaaatgcactgggaaaaagttgatgtcaataacagtataaaacagccctatttcttgataaaaaatgacaaatgactgtctcttgcggatgcttggtactgtaatgttaataatagtcacctgctgttggatgcagcaataatttctgtatggtccatagcactgtatattatggatcgatattaatgtatccaatgaaataatcgacttgttcttgatagcctcattaaagcatttggtttttcacatagtggtggcctattgtgttaatgccaattttgaatgctatctgccatatcaaaaaatggtagtgcacattttcttctgatttaatgaataacaaattgcatgaaaatttagaaaatgccagtaagtactttttttgtttaaaatgccactctaagatgttactttttggttttaaacatttttgattactttttgacttacactcagatgaggtgtaattatgcaccttttttatccccctctgaatttggggagattttaaactcccaaatgccaagacttcattttagatataggagttttatttaaaatgtttcattgagaggtggctttaaaaaagagaaattgtcagagaaacccttgcatatttacagaaaagatattgggtttttaaaatacaaatttacaataatgaaagcttaatatacccaggctgccagctcctggttgccttttttttttaatacactacttaagaatcatttgataaatgttggatttgaattgggaagtgtcagacaaaacatgtctttattccctagctagaccttaaacttctgcccttttaaaaaatatattctggcttaacctctggagaaaatgagcaagaaacttcctgtaatgcttctgatctgactgtcagctttttcctacttttaattttcttcttaaattgtaatatacaataatcaaggcctttcttttttagacctatttgaattatttatattttccctagaagtataactgtaggatcccttaaaaacatgtaaaagtagaaagatttccttttggaacaagagagaatattctgggcaaaatcaaaagcaagtaagttgaaaattggggcttttcatctccgggggatctgcagcaataccttcacccacatttctgtcctgatatttaccagtaaatagtcatttcacagcccataagaatccttcatctttagcttcccccacttacacacagacacacacacacacacacacacacaca

SEQ ID NO: 403 - DNA, 2662 bp, Homo sapiens
gaagagacccagcaacccacagagttgagaaatttgactggcattcaagctgtccaatcaatagctgccgctgaagggtggggctggatggcgtaagctacagctgaaggaagaacgtgagcacgaggcactgaggtgattggctgaaggcacttccgttgagcatctagacgtttccttggctcttctggcgccaaaatgtcgttcgtggcaggggttattcggcggctggacgagacagtggtgaaccgcatcgcggcgggggaagttatccagcggccagctaatgctatcaaagagatgattgagaactgtttagatgcaaaatccacaagtattcaagtgattgttaaagagggaggcctgaagttgattcagatccaagacaatggcaccgggatcaggaaagaagatctggatattgtatgtgaaaggttcactactagtaaactgcagtcctttgaggatttagccagtatttctacctatggctttcgaggtgaggctttggccagcataagccatgtggctcatgttactattacaacgaaaacagctgatggaaagtgtgcatacagagcaagttactcagatggaaaactgaaagcccctcctaaaccatgtgctggcaatcaagggacccagatcacggtggaggaccttttttacaacatagccacgaggagaaaagctttaaaaaatccaagtgaagaatatgggaaaattttggaagttgttggcaggtattcagtacacaatgcaggcattagtttctcagttaaaaaacaaggagagacagtagctgatgttaggacactacccaatgcctcaaccgtggacaatattcgctccatctttggaaatgctgttagtcgagaactgatagaaattggatgtgaggataaaaccctagccttcaaaatgaatggttacatatccaatgcaaactactcagtgaagaagtgcatcttcttactcttcatcaaccatcgtctggtagaatcaacttccttgagaaaagccatagaaacagtgtatgcagcctatttgcccaaaaacacacacccattcctgtacctcagtttagaaatcagtccccagaatgtggatgttaatgtgcaccccacaaagcatgaagttcacttcctgcacgaggagagcatcctggagcgggtgcagcagcacatcgagagcaagctcctgggctccaattcctccaggatgtacttcacccagactttgctaccaggacttgctggcccctctggggagatggttaaatccacaacaagtctgacctcgtcttctacttctggaagtagtgataaggtctatgcccaccagatggttcgtacagattcccgggaacagaagcttgatgcatttctgcagcctctgagcaaacccctgtccagtcagccccaggccattgtcacagaggataagacagatatttctagtggcagggctaggcagcaagatgaggagatgcttgaactcccagcccctgctgaagtggctgccaaaaatcagagcttggagggggatacaacaaaggggacttcagaaatgtcagagaagagaggacctacttccagcaaccccagaaagagacatcgggaagattctgatgtggaaatggtggaagatgattcccgaaaggaaatgactgcagcttgtaccccccggagaaggatcattaacctcactagtgttttgagtctccaggaagaaattaatgagcagggacatgaggttctccgggagatgttgcataaccactccttcgtgggctgtgtgaatcctcagtgggccttggcacagcatcaaaccaagttataccttctcaacaccaccaagcttagtgaagaactgttctaccagatactcatttatgattttgccaattttggtgttctcaggttatcggagccagcaccgctctttgaccttgccatgcttgccttagatagtccagagagtggctggacagaggaagatggtcccaaagaaggacttgctgaatacattgttgagtttctgaagaagaaggctgagatgcttgcagactatttctctttggaaattgatgaggaagggaacctgattggattaccccttctgattgacaactatgtgccccctttggagggactgcctatcttcattcttcgactagccactgaggtgaattgggacgaagaaaaggaatgttttgaaagcctcagtaaagaatgcgctatgttctattccatccggaagcagtacatatctgaggagtcgaccctctcaggccagcagagtgaagtgcctggctccattccaaactcctggaagtggactgtggaacacattgtctataaagccttgcgctcacacattctgcctcctaaacatttcacagaagatggaaatatcctgcagcttgctaacctgcctgatctatacaaagtctttgagaggtgttaaatatggttatttatgcactgtgggatgtgttcttctttctctgtattccgatacaaagtgttgtatcaaagtgtgatatacaaagtgtaccaacataagtgttggtagcacttaagacttatacttgccttctgatagtattcctttatacacagtggattgattataaataaatagatgtgtcttaacataa

SEQ ID NO: 404 - DNA, 2473 bp, Homo sapiens
acaacggcggaggccgccgggttccctgacgtgccagtcaggccttctccttttccgcagaccgtgtgtttctttaccgctctcccccgagaccttttaagggttgtttggagttttagatgcaaaatccacaagtattcaagtgattgttaaagagggaggcctgaagttgattcagatccaagacaatggcaccgggatcaggaaagaagatctggatattgtatgtgaaaggttcactactagtaaactgcagtcctttgaggatttagccagtatttctacctatggctttcgaggctttggccagcataagccatgtggctcatgttactattacaacgaaaacagctgatggaaagtgtgcatacagagcaagttactcagatggaaaactgaaagcccctcctaaaccatgtgctggcaatcaagggacccagatcacggtggaggaccttttttacaacatagccacgaggagaaaagctttaaaaaatccaagtgaagaatatgggaaaattttggaagttgttggcaggtattcagtacacaatgcaggcattagtttctcagttaaaaaacaaggagagacagtagctgatgttaggacactacccaatgcctcaaccgtggacaatattcgctccatctttggaaatgctgttagtcgagaactgatagaaattggatgtgaggataaaaccctagccttcaaaatgaatggttacatatccaatgcaaactactcagtgaagaagtgcatcttcttactcttcatcaaccatcgtctggtagaatcaacttccttgagaaaagccatagaaacagtgtatgcagcctatttgcccaaaaacacacacccattcctgtacctcagtttagaaatcagtccccagaatgtggatgttaatgtgcaccccacaaagcatgaagttcacttcctgcacgaggagagcatcctggagcgggtgcagcagcacatcgagagcaagctcctgggctccaattcctccaggatgtacttcacccagactttgctaccaggacttgctggcccctctggggagatggttaaatccacaacaagtctgacctcgtcttctacttctggaagtagtgataaggtctatgcccaccagatggttcgtacagattcccgggaacagaagcttgatgcatttctgcagcctctgagcaaacccctgtccagtcagccccaggccattgtcacagaggataagacagatatttctagtggcagggctaggcagcaagatgaggagatgcttgaactcccagcccctgctgaagtggctgccaaaaatcagagcttggagggggatacaacaaaggggacttcagaaatgtcagagaagagaggacctacttccagcaaccccagaaagagacatcgggaagattctgatgtggaaatggtggaagatgattcccgaaaggaaatgactgcagcttgtaccccccggagaaggatcattaacctcactagtgttttgagtctccaggaagaaattaatgagcagggacatgaggttctccgggagatgttgcataaccactccttcgtgggctgtgtgaatcctcagtgggccttggcacagcatcaaaccaagttataccttctcaacaccaccaagcttagtgaagaactgttctaccagatactcatttatgattttgccaattttggtgttctcaggttatcggagccagcaccgctctttgaccttgccatgcttgccttagatagtccagagagtggctggacagaggaagatggtcccaaagaaggacttgctgaatacattgttgagtttctgaagaagaaggctgagatgcttgcagactatttctctttggaaattgatgaggaagggaacctgattggattaccccttctgattgacaactatgtgccccctttggagggactgcctatcttcattcttcgactagccactgaggtgaattgggacgaagaaaaggaatgttttgaaagcctcagtaaagaatgcgctatgttctattccatccggaagcagtacatatctgaggagtcgaccctctcaggccagcagagtgaagtgcctggctccattccaaactcctggaagtggactgtggaacacattgtctataaagccttgcgctcacacattctgcctcctaaacatttcacagaagatggaaatatcctgcagcttgctaacctgcctgatctatacaaagtctttgagaggtgttaaatatggttatttatgcactgtgggatgtgttcttctttctctgtattccgatacaaagtgttgtatcaaagtgtgatatacaaagtgtaccaacataagtgttggtagcacttaagacttatacttgccttctgatagtattcctttatacacagtggattgattataaataaatagatgtgtcttaacataaaaaaaaaaaaaaaaaa

SEQ ID NO: 405 - DNA, 2473 bp, Homo sapiens
acaacggcggaggccgccgggttccctgacgtgccagtcaggccttctccttttccgcagaccgtgtgtttctttaccgctctcccccgagaccttttaagggttgtttggagtatgcaaaatccacaagtattcaagtgattgttaaagagggaggcctgaagttgattcagatccaagacaatggcaccgggatcaggaaagaagatctggatattgtatgtgaaaggttcactactagtaaactgcagtcctttgaggatttagccagtatttctacctatggctttcgaggtgaggctttggccagcataagccatgtggctcatgttactattacaacgaaaacagctgatggaaagtgtgcatacagagcaagttactcagatggaaaactgaaagcccctcctaaaccatgtgctggcaatcaagggacccagatcacggtggaggaccttttttacaacatagccacgaggagaaaagctttaaaaaatccaagtgaagaatatgggaaaattttggaagttgttggcaggtattcagtacacaatgcaggcattagtttctcagttaaaaaacaaggagagacagtagctgatgttaggacactacccaatgcctcaaccgtggacaatattcgctccatctttggaaatgctgttagtcgagaactgatagaaattggatgtgaggataaaaccctagccttcaaaatgaatggttacatatccaatgcaaactactcagtgaagaagtgcatcttcttactcttcatcaaccatcgtctggtagaatcaacttccttgagaaaagccatagaaacagtgtatgcagcctatttgcccaaaaacacacacccattcctgtacctcagtttagaaatcagtccccagaatgtggatgttaatgtgcaccccacaaagcatgaagttcacttcctgcacgaggagagcatcctggagcgggtgcagcagcacatcgagagcaagctcctgggctccaattcctccaggatgtacttcacccagactttgctaccaggacttgctggcccctctggggagatggttaaatccacaacaagtctgacctcgtcttctacttctggaagtagtgataaggtctatgcccaccagatggttcgtacagattcccgggaacagaagcttgatgcatttctgcagcctctgagcaaacccctgtccagtcagccccaggccattgtcacagaggataagacagatatttctagtggcagggctaggcagcaagatgaggagatgcttgaactcccagcccctgctgaagtggctgccaaaaatcagagcttggagggggatacaacaaaggggacttcagaaatgtcagagaagagaggacctacttccagcaaccccagaaagagacatcgggaagattctgatgtggaaatggtggaagatgattcccgaaaggaaatgactgcagcttgtaccccccggagaaggatcattaacctcactagtgttttgagtctccaggaagaaattaatgagcagggacatgaggttctccgggagatgttgcataaccactccttcgtgggctgtgtgaatcctcagtgggccttggcacagcatcaaaccaagttataccttctcaacaccaccaagcttagtgaagaactgttctaccagatactcatttatgattttgccaattttggtgttctcaggttatcggagccagcaccgctctttgaccttgccatgcttgccttagatagtccagagagtggctggacagaggaagatggtcccaaagaaggacttgctgaatacattgttgagtttctgaagaagaaggctgagatgcttgcagactatttctctttggaaattgatgaggaagggaacctgattggattaccccttctgattgacaactatgtgccccctttggagggactgcctatcttcattcttcgactagccactgaggtgaattgggacgaagaaaaggaatgttttgaaagcctcagtaaagaatgcgctatgttctattccatccggaagcagtacatatctgaggagtcgaccctctcaggccagcagagtgaagtgcctggctccattccaaactcctggaagtggactgtggaacacattgtctataaagccttgcgctcacacattctgcctcctaaacatttcacagaagatggaaatatcctgcagcttgctaacctgcctgatctatacaaagtctttgagaggtgttaaatatggttatttatgcactgtgggatgtgttcttctttctctgtattccgatacaaagtgttgtatcaaagtgtgatatacaaagtgtaccaacataagtgttggtagcacttaagacttatacttgccttctgatagtattcctttatacacagtggattgattataaataaatagatgtgtcttaacataaaaaaaaaaaaaaaaaa

SEQ ID NO: 406 - DNA, 2386 bp, Homo sapiens
acaacggcggaggccgccgggttccctgacgtgccagtcaggccttctccttttccgcagaccgtgtgtttctttaccgctctcccccgagaccttttaagggttgtttggagttttagatgcaaaatccacaagtattcaagtgattgttaaagagggaggcctgaagttgattcagatccaagacaatggcaccgggatcaggaaagaagatctggatattgtatgtgaaaggttcactactagtaaactgcagtcctttgaggatttagccagtatttctacctatggctttcgaggtgaggctttggccagcataagccatgtggctcatgttactattacaacgaaaacagctgatggaaagtgtgcatacagagcaagttactcagatggaaaactgaaagcccctcctaaaccatgtgctggcaatcaagggacccagatcacggtattcagtacacaatgcaggcattagtttctcagttaaaaaacaaggagagacagtagctgatgttaggacactacccaatgcctcaaccgtggacaatattcgctccatctttggaaatgctgttagtcgagaactgatagaaattggatgtgaggataaaaccctagccttcaaaatgaatggttacatatccaatgcaaactactcagtgaagaagtgcatcttcttactcttcatcaaccatcgtctggtagaatcaacttccttgagaaaagccatagaaacagtgtatgcagcctatttgcccaaaaacacacacccattcctgtacctcagtttagaaatcagtccccagaatgtggatgttaatgtgcaccccacaaagcatgaagttcacttcctgcacgaggagagcatcctggagcgggtgcagcagcacatcgagagcaagctcctgggctccaattcctccaggatgtacttcacccagactttgctaccaggacttgctggcccctctggggagatggttaaatccacaacaagtctgacctcgtcttctacttctggaagtagtgataaggtctatgcccaccagatggttcgtacagattcccgggaacagaagcttgatgcatttctgcagcctctgagcaaacccctgtccagtcagccccaggccattgtcacagaggataagacagatatttctagtggcagggctaggcagcaagatgaggagatgcttgaactcccagcccctgctgaagtggctgccaaaaatcagagcttggagggggatacaacaaaggggacttcagaaatgtcagagaagagaggacctacttccagcaaccccagaaagagacatcgggaagattctgatgtggaaatggtggaagatgattcccgaaaggaaatgactgcagcttgtaccccccggagaaggatcattaacctcactagtgttttgagtctccaggaagaaattaatgagcagggacatgaggttctccgggagatgttgcataaccactccttcgtgggctgtgtgaatcctcagtgggccttggcacagcatcaaaccaagttataccttctcaacaccaccaagcttagtgaagaactgttctaccagatactcatttatgattttgccaattttggtgttctcaggttatcggagccagcaccgctctttgaccttgccatgcttgccttagatagtccagagagtggctggacagaggaagatggtcccaaagaaggacttgctgaatacattgttgagtttctgaagaagaaggctgagatgcttgcagactatttctctttggaaattgatgaggaagggaacctgattggattaccccttctgattgacaactatgtgccccctttggagggactgcctatcttcattcttcgactagccactgaggtgaattgggacgaagaaaaggaatgttttgaaagcctcagtaaagaatgcgctatgttctattccatccggaagcagtacatatctgaggagtcgaccctctcaggccagcagagtgaagtgcctggctccattccaaactcctggaagtggactgtggaacacattgtctataaagccttgcgctcacacattctgcctcctaaacatttcacagaagatggaaatatcctgcagcttgctaacctgcctgatctatacaaagtctttgagaggtgttaaatatggttatttatgcactgtgggatgtgttcttctttctctgtattccgatacaaagtgttgtatcaaagtgtgatatacaaagtgtaccaacataagtgttggtagcacttaagacttatacttgccttctgatagtattcctttatacacagtggattgattataaataaatagatgtgtcttaacataaaaaaaaaaaaaaaaaa

SEQ ID NO: 407 - DNA, 1500 bp, Homo sapiens
ccaaccattctctgcaagctaagccctgctgtctgcagggactctaggattgccgacatgagcgcaccaacactgaaatgatgagtcaggttgattatggtcagaagatcttcttgcacctccaactcagggcctacaccgcggataaagaccaggaggtagttctcataggccacaaaagcctggtcgtccaaggcaagagaataggctttaaagtccctggctcggttaaaaagctggttgcgtagattcctgtcaatgctcaggatcctctgccttgtgatatctggagataagtcaacgccttgcaggacgcttacatgctcgggcagtacctctctcagcaacacctccatgcactggtatacaaagtccccctcaccccagccgcgacccttcaaggccaagaggcggcagagcccgaggcctgcacgagcagctctctcttcaggagtgaaggaggccacgggcaagtcgccctgacgcagacgctccaccagggccgcgcgctcgccgtccgccacataccgctcgtagtattcgtgctcagcctcgtagtggcgcctgacgtcgcgttcgcgggtagctacgatgaggcggcgacagaccaggcacagggccccatcgccctccggaggctccaccaccaaataacgctgggtccactcgggccggaaaactagagcctcgtcgacttccatcttgcttcttttgggcgtcatccacattctgcgggaggccacaagagcagggccaacgttagaaaggccgcaaggggagaggaggagcctgagaagcgccaagcacctcctccgctctgcgccagatcacctcagcagaggcacacaagcccggttccggcatctctgctcctattggctggatatttcgtattccccgagctcctaaaaacgaaccaataggaagagcggacagcgatctctaacgcgcaagcgcatatccttctaggtagcgggcagtagccgcttcagggagggacgaagagacccagcaacccacagagttgagaaatttgactggcattcaagctgtccaatcaatagctgccgctgaagggtggggctggatggcgtaagctacagctgaaggaagaacgtgagcacgaggcactgaggtgattggctgaaggcacttccgttgagcatctagacgtttccttggctcttctggcgccaaaatgtcgttcgtggcaggggttattcggcggctggacgagacagtggtgaaccgcatcgcggcgggggaagttatccagcggccagctaatgctatcaaagagatgattgagaactggtacggagggagtcgagccgggctcacttaagggctacgacttaacgggccgcgtcactcaatggcgcggacacgcctctttgcccgggcagaggcatgtacagcgcatgcccacaacggcggaggccgccgggttccctgacgtgccagtcaggccttctccttttccgcagaccgtgtgtttct

SEQ ID NO: 408 - DNA, 1314 bp, Homo sapiens
ggccgcgcgctcgccgtccgccacataccgctcgtagtattcgtgctcagcctcgtagtggcgcctgacgtcgcgttcgcgggtagctacgatgaggcggcgacagaccaggcacagggccccatcgccctccggaggctccaccaccaaataacgctgggtccactcgggccggaaaactagagcctcgtcgacttccatcttgcttcttttgggcgtcatccacattctgcgggaggccacaagagcagggccaacgttagaaaggccgcaaggggagaggaggagcctgagaagcgccaagcacctcctccgctctgcgccagatcacctcagcagaggcacacaagcccggttccggcatctctgctcctattggctggatatttcgtattccccgagctcctaaaaacgaaccaataggaagagcggacagcgatctctaacgcgcaagcgcatatccttctaggtagcgggcagtagccgcttcagggagggacgaagagacccagcaacccacagagttgagaaatttgactggcattcaagctgtccaatcaatagctgccgctgaagggtggggctggatggcgtaagctacagctgaaggaagaacgtgagcacgaggcactgaggtgattggctgaaggcacttccgttgagcatctagacgtttccttggctcttctggcgccaaaatgtcgttcgtggcaggggttattcggcggctggacgagacagtggtgaaccgcatcgcggcgggggaagttatccagcggccagctaatgctatcaaagagatgattgagaactggtacggagggagtcgagccgggctcacttaagggctacgacttaacgggccgcgtcactcaatggcgcggacacgcctctttgcccgggcagaggcatgtacagcgcatgcccacaacggcggaggccgccgggttccctgacgtgccagtcaggccttctccttttccgcagaccgtgtgtttctttaccgctctcccccgagaccttttaagggttgtttggagtgtaagtggaggaatatacgtagtgttgtcttaatggtaccgttaactaagtaaggaagccacttaatttaaaattatgtatgcagaacatgcgaagttaaaagatgtataaaagcttaagatggggagaaaaaccttttttcagagggtactgtgttactgttttcttgcttttcattcattccagaaatcatctgttcacatccaaaggcacaattcattttgagtttctttcaaaacaaatcgtttgtagttttaggacaggctgatgcac

SEQ ID NO: 409 - DNA, 1091 bp, Homo sapiens
ggccagaaaattcattgacttcctaaagatttattaactttctgcattacttttttttttcccctccatcgtaaatataaaagggaatagtagagaaaatcattcagaattttattttttagtgacattatttagtgacattttattagagtcacttaggaacctgaggctgaataaagttcaggtaaaagtaaaattagttgagaagagacatctgccaaaagaaatctatttttaacttcacttgctgtctttcctagaggaacagaaatagtgctgaatgtcctattagaaatgatggttgctctgcccgtctcttccctctctctcacacaatatgtaaactcatacagtgtatgagcctgtaagacaaaggaaaaacacgttaatgaggcactattgtttgtatttggagtttgttatcattgcttggctcatattaaaatatgtacattagagtagttgcagactgataaattattttctgtttgatttgccagtttagatgcaaaatccacaagtattcaagtgattgttaaagagggaggcctgaagttgattcagatccaagacaatggcaccgggatcagggtaagtaaaacctcaaagtagcaggatgtttgtgcgcttcatggaagagtcaggacctttctctgttctggaaactaggcttttgcagatgggattttttcactgaaaaattcaacaccaacaataaatatttattgagtacctattatttgctgggcactgttcaggggatgtgtcagtgaataaaatagattaaaatctattctcttctgatgcttacattatagtggtgggagacaaaatgggtataataaatattatattagatagcattaagtgctgtggagaaaactaaagcagggaggaagataggagtgtgcaagccagaaaggttgcaattaaattgagtagttcaggaaggcttcaatatggatgtgatatttgagagaccggtggaagtcaaggagcaagttgtgaggctatttaaaggtattcttggcttacagaacaatatacgcaaagactattaaatggaagcatacctgacatgttaaaggact

SEQ ID NO: 410 - DNA, 1099 bp, Homo sapiens
tgtggtagttcatgcctgtaatcccagtgctttgggaggtcaaggcagccagatcatttgagatcaggagttcgagaccagcatggccagcatagtgaagccccatctctactaaaaatacaagaaaaaattaaccaagcatggtggcgcatacctgtaatcccagccactctggaggctgagacatgaaaattgcttgaacccgggaggcggaggttgcagtgagctgagatctcgccactgcacttcagcctgggtgacagagcaagactctgtctcaaaggaggttgcagtgagctgagatctcgccactgcacttcagcctgggtgacagagcaagactctgtctcaaaaaaaaaaaaaacaaaaaccaagaaaagaaaaaaaaactcttctaagaggatttttttttcctggattaaatcaagaaaatgggaattcaaagagatttggaaaaatgagtaacatgattatttactcatctttttggtatctaacagaaagaagatctggatattgtatgtgaaaggttcactactagtaaactgcagtcctttgaggatttagccagtatttctacctatggctttcgaggtgaggtaagctaaagattcaagaaatgtgtaaaatatcctcctgtgatgacattgtctgtcatttgttagtatgtatttctcaacatagataaataaggtttggtaccttttacttgttaaatgtatgcaaatctgagcaaacttaatgaactttaactttcaaagactgagaattgttcataaataaactattttacctgcagagacctctgatatatgtttcttgatggaagtacccagtaccacctatgaagttttcttgtcaaaaaatcaaatgtgaatctgatcattacttagatctaagtaccaatatatgaaaaatataggagacaaggaagcatggtaaatgatactgagattgggagactacatggaaaaagacttgttcccttcaacagatagacagcagggaaaaaagaatagagaaaggagtaaagaacctgtagattaaaagacatttaagggacatatgaaccaggtccagtgtatagatcttacctaaa

SEQ ID NO: 411 - DNA, 1074 bp, Homo sapiens
ttggttataaaggggaaaaatggtcatgggtttttaaaatttgttttgtcttaattgcatttcaaatttacatttctaaatgaataattgcttatataaagcagttttgattaacaatataaaacactatctatttggagtgattcctttacccatttctgaaggcaagttttaaaaattactagaagacacttcattgagaatattattaaacatgcctatagttctaccacctcaacacaattgcttattaacacattaatgttttggtgtgttttggactttttaatatgtatttttcacttgttctagtaattatgctacagattgatcatttctttttcaacatgtcatcaaagcaagtgagcaaagtgctcatcgttgccacatattaatacaaaatggaagcagcagttcagataacctttccctttggtgaggtgacagtgggtgacccagcagtgagtttttctttcagtctattttcttttcttccttaggctttggccagcataagccatgtggctcatgttactattacaacgaaaacagctgatggaaagtgtgcatacaggtatagtgctgacttcttttactcatatatattcattctgaaatgtattttttgcctaggtctcagagtaatcctgtctcaacaccagtgttatcttttttggcagagatcttgagtacgttttcttttctccttattgataaattgataatcctcaaggatgattattaggtgatactcttacttcatggattcttaaaagatatgatttaacatattacaagtgcctagcaaggtgtctgttacacgtaggtattttaagtaaatggtagctgctgatgtaatttctgcccctttgcccttcagttggggtattgctttggaccgattagagggctgtggctgggatgctaaaggttcatgtttccttagctggctcctgagccaccagctcccaccacctgtgtatacctgtgctagtttgccttcccacaagtagctgctggctatctgttatgctggtacagttttcagaaactgatgaatggcctttgaacaga

SEQ ID NO: 412 - DNA, 1073 bp, Homo sapiens
tgctggaagaacagatagtttttcaaatccaattcaaggactgggtatggtggctcatgcctgtaatcccagcactttgggaggccgaggcaggcgtatccaggagttcgagactagcctgaccaacatggtgaaactccgtctctactaaaaatacaaaattagccaggtgtggtggtgggcacctgtaatctcagctacttgggaggctgaggcaggagaatcgcttgaacctggtaggcggaggttgtagtgagctgagattgtgccattgctctccagcctgggaaacaagagcaaaactccgtctcaaaaaaaaaaaaaatccaattcaaatgattatggaagtagtggagaaataaacaggaaaatgataaataattaagataatatataatatggctatattttaatctattgttgatatgattttctcttttccccttgggattagtatctatctctctactggatattaatttgttatattttctcattagagcaagttactcagatggaaaactgaaagcccctcctaaaccatgtgctggcaatcaagggacccagatcacggtaagaatggtacatgggagagtaaattgttgaagctttgtttgtataaatattggaataaaaaataaaattgcttctaagttttcagggtaataataaaatgaatttgcactagttaatggaggtcccaagatatcctctaagcaagataaatgactattggcttttgtggcatggcagcctgccacgtccttgtcttttttaagggctaggagattctttattgggatggcaaaagtcaatggcagggtagttgtcattgaaagaagattaagcttgaccccagaaggcatgggttagagcccagccttgtcactcaatggttgtatgtccagaggcaagtcacttaacatcccttaaccccagttttctcatctgtcaaatgaagcaaagaatacttgccctcttgacttaaagggtgtctgatgagacatatgactgtatcattagctgggagaaagtccatcgtgctgcctatgtatagtgcctcaagttggtct

SEQ ID NO: 413 - DNA, 1092 bp, Homo sapiens
gtatttttagtagagacagggtttcaccatgttggccaggctggtctcgaactcctgacctcaggtgacccacccaccttggcctcccaaagttctgggattacagacgtgagccactgcacccagcctgaaaaatatctttgaatgccatgtgatactatacttgtcagtttacatgtgtgtcccactaaatcatgtactctcctgagcaggatcatgctttgtcttcatattttctgtacaaagcaaagactctgacacaaagctagcccccagtgcatagttgagaaatcagtgaatgaatgtgggaggcaggaaaaatgtcctttaattcttctgttaatgctgtcttatccctggccccagtcagtgcttagaactgtgctgttggtaaatataattggattcactatcttaagacctcgcttttgccaggacatcttgggttttattttcaagtacttctatgaatttacaagaaaaatcaatcttctgttcaggtggaggaccttttttacaacatagccacgaggagaaaagctttaaaaaatccaagtgaagaatatgggaaaattttggaagttgttggcaggtacagtccaaaatctgggagtgggtctctgagatttgtcatcaaagtaatgtgttctagtgctcatacattgaacagttgctgagctagatggtgaaaagtaaaactagcttacagatagtttctggtcaaggtttagccaccaattttgcagtttctctcatctccccaggaaagagcagttggtctttagatcaatgagagctcttttatggcagacaaaacaaagtgactctagccaacttgagctaaaaagaaatttagtggaaggctaggagttaccacatgaagtgtgtgcagctgccccttggagagaataagaaccagggtgcctctgggacttaacatcattactgtactccagttgttttcattcttttcctgactttgctctagagtcagtttcctaacagagtacattcgatgatcatgtgcccatatctgtggggagaagatttcttgattggcagtcttactaagggtgcatatcaagtagaatg

SEQ ID NO: 414 - DNA, 1043 bp, Homo sapiens
aacatggcgaaacgccatctctactaaaaatacaaaaaaaattagctgggcctggtggcaggcgcctataatcccagctactcgggaggctgaggcgggagaatcgcttgagtccaggaggcggaggttgcagtgagctgagatcgtgccattgcactccagcctgggcaacaagagcaaaactctgtctcaaaaataaataaaaataaataaaaaagagatagtggcgtgatatccttgattctatcagcaacctataaaagtagagaggagtctgtgttttgattcagtcacctttagcatttttatttccatgaagtttctgctggtttatttttctgtgggtaaaatattaataggctgtatggagatatttttctttatatgtacctttgtttagattactcaactccactaatttatttaactaaaagggggctctgacatctagtgtgtgtttttggcaactcttttcttactcttttgtttttcttttccaggtattcagtacacaatgcaggcattagtttctcagttaaaaaagtaagttcttggtttatgggggatggttttgttttatgaaaagaaaaaaggggatttttaatagtttgctggtggagataaggttatgatgtttcagtctcagccatgagacaataaatccttgtgtcttctgctgtttgtttatcagcaaggagagacagtagctgatgttaggacactacccaatgcctcaaccgtggacaatattcgctccatctttggaaatgctgttagtcggtatgtcgataacctatataaaaaaatcttttacatttattatcttggtttatcattccatcacattattttggaacctttcaagatattatgtgtgttaagagtttgctttagtcaaatacacaggcttgttttatgcttcagatttgttaatggagttcttatttcacgtaatcaacactttctaggtgtatgtaatctcctagattctgtggcgtgaatcatgtgttctttcaaggtcttagtcttgaaaatatttatag

SEQ ID NO: 415 - DNA, 1089 bp, Homo sapiens
aaaaataaataaaaataaataaaaaagagatagtggcgtgatatccttgattctatcagcaacctataaaagtagagaggagtctgtgttttgattcagtcacctttagcatttttatttccatgaagtttctgctggtttatttttctgtgggtaaaatattaataggctgtatggagatatttttctttatatgtacctttgtttagattactcaactccactaatttatttaactaaaagggggctctgacatctagtgtgtgtttttggcaactcttttcttactcttttgtttttcttttccaggtattcagtacacaatgcaggcattagtttctcagttaaaaaagtaagttcttggtttatgggggatggttttgttttatgaaaagaaaaaaggggatttttaatagtttgctggtggagataaggttatgatgtttcagtctcagccatgagacaataaatccttgtgtcttctgctgtttgtttatcagcaaggagagacagtagctgatgttaggacactacccaatgcctcaaccgtggacaatattcgctccatctttggaaatgctgttagtcggtatgtcgataacctatataaaaaaatcttttacatttattatcttggtttatcattccatcacattattttggaacctttcaagatattatgtgtgttaagagtttgctttagtcaaatacacaggcttgttttatgcttcagatttgttaatggagttcttatttcacgtaatcaacactttctaggtgtatgtaatctcctagattctgtggcgtgaatcatgtgttctttcaaggtcttagtcttgaaaatatttatagtgtagtagaactattttatcctccaatgctccttcttttccttgtatttccattatcatcactttaggatttcacttatttatcattcaacatttattaattgcctctcatattccaggctttgtgctagaagttagggatataaagacaaataagatatttcctgcccttaaagactagattcgtgttgctaagtcttcattatcaagaaaagcataagtggggaaaagtgcttgc

SEQ ID NO: 416 - DNA, 1113 bp, Homo sapiens
accttccctccccagtaaacactcctgggaacaacacacattgtagaaccacgttgtggtgctgttcagtatagcaagtaattcagcagagataagttcttggaatctcatctttgggatttagttactaagatacattcaagtttgagcaaaataaggtctcagagcttggattcattgttctgttccagcaattagagcagtacctggcacatagcacaagtgcttgaaaacactgactgagtagggtaggtgggtgagtgggtgggtgggtgggtgggtggatggatggatgggaggatgggtgggtgaatgggtgaacagacaaatggatggatgaatggacaggcacaggaggacctcaaatggaccaagtcttcggggccctcatttcacaaagttagtttatgggaaggaaccttgtgtttttaaattctgattcttttgtaatgtttgagttttgagtattttcaaaagcttcagaatctcttttctaatagagaactgatagaaattggatgtgaggataaaaccctagccttcaaaatgaatggttacatatccaatgcaaactactcagtgaagaagtgcatcttcttactcttcatcaaccgtaagttaaaaagaaccacatgggaaatccactcacaggaaacacccacagggaattttatgggaccatggaaaaatttctgatccataggtttgattaaacatggagaaacctcatggcaaagtttggttttattgggaagcatgtataatttttgtcctaagtctgtgctcagccctcccacatgtgctcattgctggttgactgttggagtctggttcttacctctaagaggaagcccaggagagggcataaagccagcacactgtcctcacctgatggtgtcagagtccttacgagtaagccctagccagaacattgctggaagagatcaagggccactgtttgaaattgcacagcaggatacggaaaaggggtaccttaggtataggcattgtcattaaagaaattgctaagatacttgagattttcctgtttaaggaatgagctttatgatacaaagagcagttctaaaaattagggagggaattaactaaatt

SEQ ID NO: 417 - DNA, 1094 bp, Homo sapiens
ggctcccgaagcacctagaaccggaagagttggctcactatttagcacacacacacgtctataatagtgctggccacttggggttggaattagtttatttatcagcatgttgtctcccagcacttggtgtgtgtgatatgcagtatgtatttgcagaatgaaaagtctgagggctgacatcatatttcccactgtgcccagaaagagcacagttagtccacatgagctaatgggggcaaagggaagtgaggagggagaatgtactgccttatcatgttttctattacttggctgaagtaaaacagtcccaagccgatagtaagatagtgggctggaaagtggcgacaggtaaaggtgcacctttcttcctggggatgtgatgtgcatatcactacagaaatgtctttcctgaggtgatttcatgactttgtgtgaatgtacacctgtgacctcacccctcaggacagttttgaactggttgctttctttttattgtttagatcgtctggtagaatcaacttccttgagaaaagccatagaaacagtgtatgcagcctatttgcccaaaaacacacacccattcctgtacctcaggtaatgtagcaccaaactcctcaaccaagactcacaaggaacagatgttctatcaggctctcctctttgaaagagatgagcatgctaatagtacaatcagagtgaatcccatacaccactggcaaaaggatgttctgtcccttcttacaggtacaaggcacagttttccttcatttattcactaatttagcagaacctcactaagagcctcctatatgccaggctctgcgttagcaataaaaggaatgccatgcctcaccccatcaggaggtgctgatagcttgtaggcggagtggaaacagatgtgctctagaggctctaaatattacttctgctggggtcagttgggaagccacaacagctactgttcatcttccataaaagacaatcagccgggcacagtggctcacacctgtaaatcccagcactttgggaggctgaggtgggtggatcacaaggtcaggtgtttgagaccagcctggccaacgtggcgaaaccct

SEQ ID NO: 418 - DNA, 1154 bp, Homo sapiens
tgactccctggttgaagggattctcctccctcagcctcccgagtacctgggattacaggcatgcgccaccacgcccagctaatttttgtatttttagtagagacgtggtttcatcatgttggccaggatggtctcgatctcctgaccttgtgatccacccgcctcggcctccccaaatgctgggattacaggcgtgagccaccacgcccggccacttggcatgaatttaattcccgccataaacctgtgagataggtaattctgttatatccactttacaaatgaagagactgaggcaaagaaagatgatgtaacttacgcaaagctacacagctcttaagtagcagtgccaatatttgaacacactcagactcgatcctgaggttttgaccactgtgtcatctggcctcaaatcttctggccaccacatacaccatatgtgggctttttctccccctcccactatctaaggtaattgttctctcttattttcctgacagtttagaaatcagtccccagaatgtggatgttaatgtgcaccccacaaagcatgaagttcacttcctgcacgaggagagcatcctggagcgggtgcagcagcacatcgagagcaagctcctgggctccaattcctccaggatgtacttcacccaggtcagggcgcttctcatccagctacttctctggggcctttgaaatgtgcccggccagacgtgagagcccagatttttgcctgttatttaggaactttctttgcaagtattacctggatagttttaacattttcttctttgaacctagttataaaggtattgtgctgttgttcctaggcttagagtcataaggcctgagctcacttcctcactttgcctccatctggaaccttagaccaacttcctaggaaaacgagctgtctgaaaacagaatagggtgcctcttcaatgtgctcttcactggagatgttcaggaggaggctactcccacctacacagggtgcagtggagggtctgggccccagggaggcagcaggaagagtggaaagagcggaggctctactgttggacagacctgggttaccagccgtgtgactagccttccctggcctccatatccccctcagtaatgaaggaatgtgtcatccccaaatccaggga

SEQ ID NO: 419 - DNA, 1371 bp, Homo sapiens
ttgttgccaggagctgggaggaaggggaagtgagaaattgtttaatgggcacagagtttcagtttggggaagatgaaaaagttctagagatagctggtggtgatggttgcgcaacaatgtaaatgccactgagctctcatttaaaaatggttaaaatggtaaattttatatatattttaccacaataaaaaaaagtcttcttctgggagcacccccccaagacaaaaatatgaaaattttacactgatacttccatttcaagataattttaagattataaggattttgcttaattcttgaattttatacctgtaaaccttttatacttcaaatttcgggcagaattgcttctataacaatgataattatacctcatactagcttctttcttagtactgctccatttggggacctgtatatctatacttcttattctgagtctctccactatatatatatatatatatatatatttttttttttttttttttttaatacagactttgctaccaggacttgctggcccctctggggagatggttaaatccacaacaagtctgacctcgtcttctacttctggaagtagtgataaggtctatgcccaccagatggttcgtacagattcccgggaacagaagcttgatgcatttctgcagcctctgagcaaacccctgtccagtcagccccaggccattgtcacagaggataagacagatatttctagtggcagggctaggcagcaagatgaggagatgcttgaactcccagcccctgctgaagtggctgccaaaaatcagagcttggagggggatacaacaaaggggacttcagaaatgtcagagaagagaggacctacttccagcaaccccaggtatggccttttgggaaaagtacagcctacctcctttattctgtaataaaactgccttctaactttggcttttcatgaatcacttgcatcttctctctgcctgacttgccctctggaatggtgctggaatggtcctgtggccttgtccactgtctgcctttgaccataacttgaaagtcacccaccatagtgtcctttgaaataacttaaatgtccacagttccaagcatgagttaaaaacacttcagaatgtagagtagttgttcaattgaataaacacacacaccagaaaaaaaagcaagtttatcttttatttttagtaaagaattttgatagagcctcaacaccagaaatggctagagagagaagcctaacatatctggaggattatttttcatcctacttaaagctgctttcacttttttcaggaaaaaacacacgttctgaatctaatttataaaactccctggccgggtgctgtggctcacacctataatccc

SEQ ID NO: 420 - DNA, 1149 bp, Homo sapiens
ggcagaggctgcagtgagctgagatcacaccacagcactccagcctggaagacatagtgagactctctctcaaaaaaaaaaaaaaaaaaaaaggaagtaagcattgtgagggcaggtaccttctctgttttgttcattgctggatgtagttagtatacagcagtatctgatggatggatagatggaggaatgaatgaatgagacttcacaaattcagctcacttgctcaaggccctgcagctctacgggatgaagctatactccagagtcctgctacattggctgtgtggccagctgctgggatctgagggttgtcagataagcagtctaccagagaacagactgatcttgttggccttctgccagcacaggggttcattcacagctctgtagaaccagcacagagaagttgcttgctcctccaaaatgcaacccacaaaatttggctaagtttaaaaacaagaataataatgatctgcacttccttttcttcattgcagaaagagacatcgggaagattctgatgtggaaatggtggaagatgattcccgaaaggaaatgactgcagcttgtaccccccggagaaggatcattaacctcactagtgttttgagtctccaggaagaaattaatgagcagggacatgagggtacgtaaacgctgtggcctgcctgggatgcatagggcctcaactgccaaggttttggaaatggagaaagcagtcatgttgtcagagtggccactacagttttgctgggcaagctcctcttcctttactaacccacaatagcatcagcttaaagacaatttttgattgggagaaaagggagaaaaataatctctgtttattttaattagcattaattggtattcttgttaaaccataggagtcagagtaaatcagccatttcaccaattttcagtttgtttctgtcttagctaacagcagtgtaatggtcagcaaaattcttatcttgtgtactgaatggcatgtcctgttgctgaaagtgcacaggcttgggaggtagccatgagctcaaatcctggcactaccacctctcttgtgtgaccttagactcctgacctttctatgcctcagttctttcttacctataaaatgaaattaattttacccttaaagatcatcgt

SEQ ID NO: 421 - DNA, 1109 bp, Homo sapiens
cccttggagggacaggggagtgggcatgggcatagtagtatggttttccttttcactgggggtgcagcccttggagtctcagcttaatgtgttggggaagtggtctcctattagactctccatttcaaaccattccatgattttgtcctccttttgccaccttccgagcctgtaaaaactaatgtttgtgattcctgaggtttctctaatgtcttttaataaagttgacctcagagatctcgttacctctctgagttcctgctttgtcttagattttgatccttgagtgttctttaatcttttagcaattccttgttgcatgttaaaagattagttatattttattcctcatttgtgttcgttttcaccaggaggctcaattcaggcttctttgcttacttggtgtctctagttctggtgcctggtgctttggtcaatgaagtggggttggtaggattctattacttacctgttttttggttttattttttgttttgcagttctccgggagatgttgcataaccactccttcgtgggctgtgtgaatcctcagtgggccttggcacagcatcaaaccaagttataccttctcaacaccaccaagcttaggtaaatcagctgagtgtgtgaacaagcagagctactacaacaatggtccagggagcacaggcacaaaagctaaggagagcagcatgaggtagttgggagggcacaggctttggagtcagacacatgtggtttcaaatccaagttcgaccatttcccatttatttgactgtagacaagttacattcctaaactatgtctcagatttctcatctgtaagttgtggtattactagttaacatgcaggggttttgtttgtttgtttgtttgtttgtttgtgagggtaagaaataacccaagaagcctagtccttggtagttgctcagtgccctataaatgttgtgaaccaggtggtgagggtttggtgctgctagagaattctggtatctgctctgtgcaacagagtactgtaggtgatgcaagagaaagaagacctgatgccttctttcctcccagctttgagaatggagcaaaggcctaccccagccaccaagtgagccagt

SEQ ID NO: 422 - DNA, 1064 bp, Homo sapiens
atcatcctaaactacatgtcagcatagtataatcctgccttaggtctacttttgattatttaggaagactccctgcccttcctatacatttcacataatttttaataagttgtaaaaaagtgatttataggattctttgtaagtgggggaagttaagcagacaaaaagtttttaaatcttactgcagagtgtcaggaaccttttatagcaccagacaggtagggacagaacatgagtggcagcaagccagacttggtcttagtgctctaacctgtctgttagaggctggccagtcagacccctggttgaagacgttgggaatcccagctctttggaggggtaagagattttgttagactgttaaccagattccacagccaggcagaactatttctgtctcatccatgtttcagggattacttctcccattttgtcccaactggttgtatctcaagcatgaattcagcttttccttaaagtcacttcatttttattttcagtgaagaactgttctaccagatactcatttatgattttgccaattttggtgttctcaggttatcggtaagtttagatccttttcacttctgaaatttcaactgatcgtttctgaaaatagtagctctccactaatatcttatttgtagtatgttaaatttttctaaaacttctaaggatagttgctgtattgtatgatttgcatatggaggtatctataagaagttttatactttttagcaaaatagtcatttggtagccaacttaaacaaatgtttattaatatagaagttaataatatctactgatactcggccgggtgcggtggctcatgcctgtaatcccaccactttgggaggctgaggcgggcagatcatttgaggtcaggagttcaagaccagcctgaccaatatgatgaaaccctgtctctactaaattacaaatattagcagggtatggtggtgggcgcctgtaatcccagctactcaggaggctaaggcaggagaatcatttgaacccaggaggcagaggttgcaatgagctgagatcacgccactgcactccag

SEQ ID NO: 423 - DNA, 1165 bp, Homo sapiens
aaagtatgagtaacatattatcagaaggggagaaatggaagataacttaggcatcttatttttaagcatagttttccctttgtttctgcattagatgatttacctgaaatgtcattcaatttaacttactctccatcctcacccgcccagctttggttatgaggcagtagaaagaaatgatctgcctgtggttttctagaaatacgaaagttgagtccttaaggctacacagaaagaaagtacctccccagggcttcacccttcccatcctttcagcaggctttttgtctgtcgtatcttctctgttgaaatggccattgacaagaggaggaaaggggttttgttgtggattgttcaggcacttcctttggggtatatgggggatgagtgttacatttatggtttctcacctgccattctgatagtggattcttgggaattcaggcttcatttggatgctccgttaaagcttgctccttcatgttcttgcttcttcctaggagccagcaccgctctttgaccttgccatgcttgccttagatagtccagagagtggctggacagaggaagatggtcccaaagaaggacttgctgaatacattgttgagtttctgaagaagaaggctgagatgcttgcagactatttctctttggaaattgatgaggtgtgacagccattcttatacttctgttgtattcttcaaataaaatttccagccgggtgcggtggctcatggctgtaatcccagcactttgggaggctgaggtgggcagataacttggggtcaggagttcaaaaccagctggccaacatgatgaaaccccgtctctactaaaaaaatagaaaaattagccaggcgtggtggcgggtacctgtaatccaagctgctcaggaggctgaggcagaagaatcacttaaacccaagaggtagaagttgcagtgagccgagattgcaccactgcactctagcctaggcgacagcgagactgcgtctcaaaaaaaaaaaaaaagaacgttccaaggtcaggactaggcctcccctcagaagcagcaagtgacatatgtgacatcctctccactccctatttgcatttctaggttatataactgtactactatccatgcatgcctactcttgttcccagggtgaaggacccagacatg

SEQ ID NO: 424 - DNA, 1093 bp, Homo sapiens
aaaaaaaaaaaaagaacgttccaaggtcaggactaggcctcccctcagaagcagcaagtgacatatgtgacatcctctccactccctatttgcatttctaggttatataactgtactactatccatgcatgcctactcttgttcccagggtgaaggacccagacatggagagccgaatccctgcaggccattataaatgagattatgccatttgctcccatttcttcttattctttcatttttggggctctccatcttgatgtgttctttggatcgtgaacagatccaaagaaaaggttgttctgccgtgctgtttgtcaggatgaaaaactcttttttaagtgtttaggtctgcccccagtgcccagcccaatcaagtaacgtggtcacccagagtggcagataggagcacaaggcctgggaaagcactggagaaatgggatttgtttaaactatgacagcattatttcttgttcccttgtcctttttcctgcaagcaggaagggaacctgattggattaccccttctgattgacaactatgtgccccctttggagggactgcctatcttcattcttcgactagccactgaggtcagtgatcaagcagatactaagcatttcggtacatgcatgtgtgctggagggaaagggcaaatgaccaccctttgatctggaatgataaagatgataagggtgggatagctgaaggcctgctctcatccccactaatattcattcccagcaatattcagcagtcccatttacagttttaacgcctaaagtatcacatttcgttttttagctttaagtagtctgtgatctccgtttagaatgagaatgtttaaattcgtacctattttgaggtattgaatttctttggaccaggtgaattgggacgaagaaaaggaatgttttgaaagcctcagtaaagaatgcgctatgttctattccatccggaagcagtacatatctgaggagtcgaccctctcaggccagcaggtacagtggtgatgcacactggcaccccaggactaggacaggacctcatacaatctttaggagatgaaacttgcccatctctaaaatttcgg

SEQ ID NO: 425 - DNA, 1114 bp, Homo sapiens
cacccagagtggcagataggagcacaaggcctgggaaagcactggagaaatgggatttgtttaaactatgacagcattatttcttgttcccttgtcctttttcctgcaagcaggaagggaacctgattggattaccccttctgattgacaactatgtgccccctttggagggactgcctatcttcattcttcgactagccactgaggtcagtgatcaagcagatactaagcatttcggtacatgcatgtgtgctggagggaaagggcaaatgaccaccctttgatctggaatgataaagatgataagggtgggatagctgaaggcctgctctcatccccactaatattcattcccagcaatattcagcagtcccatttacagttttaacgcctaaagtatcacatttcgttttttagctttaagtagtctgtgatctccgtttagaatgagaatgtttaaattcgtacctattttgaggtattgaatttctttggaccaggtgaattgggacgaagaaaaggaatgttttgaaagcctcagtaaagaatgcgctatgttctattccatccggaagcagtacatatctgaggagtcgaccctctcaggccagcaggtacagtggtgatgcacactggcaccccaggactaggacaggacctcatacaatctttaggagatgaaacttgcccatctctaaaatttcgggatttctttgtacccaacaaggttcaaacacaacagtcagcttttattcatgatttttacttccatctgctgatgtagaacatacctccagagtgacctcagaaattgtcaaatgtgaaaacacaagccatcacagtgagaaatgggaggttgagttagattgtctaaggctggagagtccatatactcccactgttagctctgaagtgtgtagccagtcttcagattctgggtcagttgcctcagtctctcttagcttttgccttactctttatccgaccactgccctgccaggaaaacaaggctctataactcctcttacaggtcagcttgacacaaaaagggtgcctggattcctaatgtttcattgtcacttttcccagtcagatgataatgcttttcaaatca

SEQ ID NO: 426 - DNA, 1361 bp, Homo sapiens
tacttcctacagttgccatccaaatatcagtcaggatcagacatgatgttagctcctgctacaataaaaccattttctccctgaatgaaaacaaaggttccacaggagacagtcccacagagcagtggcttcttttcctccctttaaaacctcatgttggctggacacagtggctcacacctgtaatcccagcattttaggaggctgaggtgggaagatggcttaagcccaggagtttgaggctgtagagctatgatcacaccactgcccttcagcctgggtgacagagcaagaccttgtctctaaataaacaaacaaacaaaaaatcctcttgtgttcaggcctgtgggatcccctgagaggctagcccacaagatccacttcaaaagccctagataacaccaagtctttccagacccagtgcacatcccatcagccaggacaccagtgtatgttgggatgcaaacagggaggcttatgacatctaatgtgttttccagagtgaagtgcctggctccattccaaactcctggaagtggactgtggaacacattgtctataaagccttgcgctcacacattctgcctcctaaacatttcacagaagatggaaatatcctgcagcttgctaacctgcctgatctatacaaagtctttgagaggtgttaaatatggttatttatgcactgtgggatgtgttcttctttctctgtattccgatacaaagtgttgtatcaaagtgtgatatacaaagtgtaccaacataagtgttggtagcacttaagacttatacttgccttctgatagtattcctttatacacagtggattgattataaataaatagatgtgtcttaacataatttcttatttaattttattatgtatatattgtgtcagttcagatgccaaaaagaggtcttgaacatgtcacaggctctgatggcactgaccatggagaaagcttgatttgatcatctggtgtctacaataaccaaagctaattattaaggaaaaaaacttgaagaaagaaaatagtccttacttcatctataatgaggtttttgtttttttgttttgagacggagtcttgctttgttgcccaggccggagtgcagtggcgcgatattggctcactgcaacctccgcttaccgggttcaagcaattctcctgcctcagcttcctgagtagctgggattacaggcacctgccaccacgcccggctaatttttgtatttttagtagagatgtggtttcacgatgctggccaagctggtctcaaactcctgacctcaggtgatcctcccacctcagcctcccaaagttaagtgctgggattacaggcatgagccactgcggccg

SEQ ID NO: 427 - DNA, 1500 bp, Homo sapiens
ggctagcccacaagatccacttcaaaagccctagataacaccaagtctttccagacccagtgcacatcccatcagccaggacaccagtgtatgttgggatgcaaacagggaggcttatgacatctaatgtgttttccagagtgaagtgcctggctccattccaaactcctggaagtggactgtggaacacattgtctataaagccttgcgctcacacattctgcctcctaaacatttcacagaagatggaaatatcctgcagcttgctaacctgcctgatctatacaaagtctttgagaggtgttaaatatggttatttatgcactgtgggatgtgttcttctttctctgtattccgatacaaagtgttgtatcaaagtgtgatatacaaagtgtaccaacataagtgttggtagcacttaagacttatacttgccttctgatagtattcctttatacacagtggattgattataaataaatagatgtgtcttaacataatttcttatttaattttattatgtatatattgtgtcagttcagatgccaaaaagaggtcttgaacatgtcacaggctctgatggcactgaccatggagaaagcttgatttgatcatctggtgtctacaataaccaaagctaattattaaggaaaaaaacttgaagaaagaaaatagtccttacttcatctataatgaggtttttgtttttttgttttgagacggagtcttgctttgttgcccaggccggagtgcagtggcgcgatattggctcactgcaacctccgcttaccgggttcaagcaattctcctgcctcagcttcctgagtagctgggattacaggcacctgccaccacgcccggctaatttttgtatttttagtagagatgtggtttcacgatgctggccaagctggtctcaaactcctgacctcaggtgatcctcccacctcagcctcccaaagttaagtgctgggattacaggcatgagccactgcggccggcattaagtatgagtttttaagttagcccactttgttaatgactatgagtactaatagcttaagataaagaagtttctaggtaatcttgtttgaaggatgatgtaaaaatataaatttaaactgtgagtgacaaaataaacttccttaatatttgcctacatttagagaaatggagcattcagctcagaaaggaagaatgtctgtggttttaaggtaaaatccatattccaagactcagtgaagaaagttcagtgataaagaacagactactctcatcttatgaagaaatggagcaatttcacttggaaagactaggaagacaaaatgttacagacgtatttgttgtgccacaaaataggcaaggtcagttttgaacaataagaactccataaagtagaccagggcatctcagaagtgaggttccatgagcccaggtggggcacaggctgggtgatcttgagtggagaggaagaggggttttctgagcttcaagagctgg

SEQ ID NO: 428 - DNA, 7897 bp, Homo sapiens
aacaactggtgcgcatgcgcactggtgtctcgcggcctggcgcgccccctccgaagcgcatgctcgtgggcacgcacgagcctcaagatccaaggtgcgcgcgtcggcgtccgaggcggttggtgtcggagaatttgttaagcgggactccaggcaattatttccagtcagagaaggaaaccagtgcctggcattctcaccatctttctacctaccatgatcaagtgcttgtcagttgaagtacaagccaaattgcgttctggtttggccataagctccttgggccaatgtgttgaggaacttgccctcaacagtattgatgctgaagcaaaatgtgtggctgtcagggtgaatatggaaaccttccaagttcaagtgatagacaatggatttgggatggggagtgatgatgtagagaaagtgggaaatcgttatttcaccagtaaatgccactcggtacaggacttggagaatccaaggttttatggtttccgaggagaggccttggcaaatattgctgacatggccagtgctgtggaaatttcgtccaagaaaaacaggacaatgaaaacttttgtgaaactgtttcagagtggaaaagccctgaaagcttgtgaagctgatgtgactagagcaagcgctgggactactgtaacagtgtataacctattttaccagcttcctgtaaggaggaaatgcatggaccctagactggagtttgagaaggttaggcagagaatagaagctctctcactcatgcacccttccatttctttctctttgagaaatgatgtttctggttccatggttcttcagctccctaaaaccaaagacgtatgttcccgattttgtcaaatttatggattgggaaagtcccaaaagctaagagaaataagttttaaatataaagagtttgagcttagtggctatatcagctctgaagcacattacaacaagaatatgcagtttttgtttgtgaacaaaagactagttttaaggacaaagctacataaactcattgactttttattaaggaaagaaagtattatatgcaagccaaagaatggtcccaccagtaggcaaatgaattcaagtcttcggcaccggtctaccccagaactctatggcatatatgtaattaatgtgcagtgccaattctgtgagtatgatgtgtgcatggagccagccaaaactctgattgaatttcagaactgggacactctcttgttttgcattcaggaaggagtgaaaatgtttttaaagcaagaaaaattatttgtggaattatcaggtgaggatattaaggaatttagtgaagataatggttttagtttatttgatgctactcttcagaagcgtgtgacttccgatgagaggagcaatttccaggaagcatgtaataatattttagattcctatgagatgtttaatttgcagtcaaaagctgtgaaaagaaaaactactgcagaaaacgtaaacacacagagttctagggattcagaagctaccagaaaaaatacaaatgatgcatttttgtacatttatgaatcaggtggtccaggccatagcaaaatgacagagccatctttacaaaacaaagacagctcttgctcagaatcaaagatgttagaacaagagacaattgtagcatcagaagctggagaaaatgagaaacataaaaaatctttcctggaacatagctctttagaaaatccgtgtggaaccagtttagaaatgtttttaagcccttttcagacaccatgtcactttgaggagagtgggcaggatctagaaatatggaaagaaagtactactgttaatggcatggctgccaacatcttgaaaaataatagaattcagaatcaaccaaagagatttaaagatgctactgaagtgggatgccagcctctgccttttgcaacaacattatggggagtacatagtgctcagacagagaaagagaaaaaaaaagaatctagcaattgtggaagaagaaatgtttttagttatgggcgagttaaattatgttccactggctttataactcatgtagtacaaaatgaaaaaactaaatcaactgaaacagaacattcatttaaaaattatgttagacctggtcccacacgtgcccaagaaacatttggaaatagaacacgtcattcagttgaaactccagacatcaaagatttagccagcactttaagtaaagaatctggtcaattgcccaacaaaaaaaattgcagaacgaatataagttatgggctagagaatgaacctacagcaacttatacaatgttttctgcttttcaggaaggtagcaaaaaatcacaaacagattgcatattatctgatacatccccctctttcccctggtatagacacgtttccaatgatagtaggaaaacagataaattaattggtttctccaaaccaatcgtccgtaagaagctaagcttgagttcacagctaggatctttagagaagtttaagaggcaatatgggaaggttgaaaatcctctggatacagaagtagaggaaagtaatggagtcactaccaatctcagtcttcaagttgaacctgacattctgctgaaggacaagaaccgcttagagaactctgatgtttgtaaaatcactactatggagcatagtgattcagatagtagttgtcaaccagcaagccacatccttaactcagagaagtttccattctccaaggatgaagattgtttagaacaacagatgcctagtttgagagaaagtcctatgaccctgaaggagttatctctctttaatagaaaacctttggaccttgagaagtcatctgaatcactagcctctaaattatccagactgaagggttccgaaagagaaactcaaacaatggggatgatgagtcgttttaatgaacttccaaattcagattccagtaggaaagacagcaagttgtgcagtgtgttaacacaagatttttgtatgttatttaacaacaagcatgaaaaaacagagaatggtgtcatcccaacatcagattctgccacacaggataattcctttaataaaaatagtaaaacacattctaacagcaatacaacagagaactgtgtgatatcagaaactcctttggtattgccctataataattctaaagttaccggtaaagattcagatgttcttatcagagcctcagaacaacagataggaagtcttgactctcccagtggaatgttaatgaatccggtagaagatgccacaggtgaccaaaatggaatttgttttcagagtgaggaatctaaagcaagagcttgttctgaaactgaagagtcaaacacgtgttgttcagattggcagcggcatttcgatgtagccctgggaagaatggtttatgtcaacaaaatgactggactcagcacattcattgccccaactgaggacattcaggctgcttgtactaaagacctgacaactgtggctgtggatgttgtacttgagaatgggtctcagtacaggtgtcaaccttttagaagcgaccttgttcttcctttccttccgagagctcgagcagagaggactgtgatgagacaggataacagagatactgtggatgatactgttagtagcgaatcgcttcagtctttgttctcagaatgggacaatccagtatttgcccgttatccagaggttgctgttgatgtaagcagtggccaggctgagagcttagcagttaaaattcacaacatcttgtatccctatcgtttcaccaaaggaatgattcattcaatgcaggttctccagcaagtagataacaagtttattgcctgtttgatgagcactaagactgaagagaatggcgaggcaggtgggaacctgctcgtgctggtggatcagcacgctgcccatgagcgtatacgtctggagcagcttatcattgattcctacgagaagcaacaggcacaaggctctggtcggaaaaaattactgtcttctactctaattcctccgctagagataacagtgacagaggaacaaaggagactcttatggtgttaccacaaaaatctggaagatctgggccttgaatttgtatttccagacactagtgattctctggtccttgtgggaaaagtaccactatgttttgtggaaagagaagccaatgaacttcggagaggaagatctactgtgaccaagagtattgtggaggaatttatccgagaacaactggagctactccagaccaccggaggcatccaagggacattgccactgactgtccagaaggtgttggcatcccaagcctgccatggggccattaagtttaatgatggcctgagcttacaggaaagttgccgccttattgaagctctgtcctcatgccagctgccattccagtgtgctcacgggagaccttctatgctgccgttagctgacatagaccacttggaacaggaaaaacagattaaacccaacctcactaaacttcgcaaaatggcccaggcctggcgtctctttggaaaagcagagtgtgatacaaggcagagcctgcagcaatccatgcctccctgtgagccaccatgagaacagaatcactggtctaaaaggaacaaagggatgttcactgtatgcctctgagcagagagcagcagcagcaggtaccagcacggccctgactgaatcagcccagtgtccctgagcagcttagacagcagggctctctgtatcagtctttcttgagcagatgattcccctagttgagtagccagatgaaattcaagcctaaagacaattcattcatttgcatccatgggcacagaaggttgctatatagtatctaccttttgctacttatttaatgataaaatttaatgacagtttgattggttgcttggtttgttatttgaagggtgtgatttttgtttttgtacagttttttttcaagcttcacatttgcgtgtatctaattcagctgatgctcaagtccaaggggtagtctgccttcccaggctgcccccagggtttctgcactggtcccctcttttcccttcagtcttcttcacttccctatgctgctgcttcatgtgctacatctcagacttaaagagtttctctactacagtgaaaacattctctagggtctttcatcaggcctttagttattttagggataaaaactattgataaaaaggacaaggatagaacagagaaaatttaaagtcctgttccgggttttttgttatgttttctttaaaaactcagagactgatgttcaatatcccaaaccagtaaaatggtgaaaatactatgagcttgttttttaaaatatgattttttttggtactttataaagtatctctttatgtgaaagcaattgtcatatcaaaacacagcatacatacgttcaacctaaccaaatatctttacactttttctttcaggagacaagggttctttgggtccctttcaaacggtatcttggtgttattacattatgcctatctattgcccttataatatcacttgggaccaggactgatcgttctgcaaatgcttgttatgccattctcaatctatttttcccgcaccttttcacatgatttgtggttaataggactcaacagactaaaattgcatagtagaaaaaaaatgcaaaaagccagctggtaatgtttattgcaactggggtgctatacaattagtaagatgatgcaatgagaatttctacttttgtatttcctgaccagcctgctcaaagtggcttttatatcaattgaatgattttcctcattttttaatacaggaaaccaattcgtgctcatggaagaaaagttcctttgccagcagccttgaagtgaatcttacaggagcaatgaaagtattgcattcattagcgtctgccccagagaaggttcagagaaaaccttcacttgttttcaaggggatccttgtagatttacgtaattggaatcctgaagaacaggccctactgtctaaaaaatggcttttattcttctaaatacatataaacggatgttttatagatgggaagacatgaccttagaaaggagagagttttcagaggatttgccaggctgtcaggggctctgcctccaggcccagtgtggcagtgtggcctcagggcctccgcctccctgcttgagggctgcatggaggccaactgtcctgggagttgtaaaaatcttttaaggccagaccaatttgagggattttaaaaagtgtctcagtgcctcttatgatttcagaaggttttgctatatgtaatcccaactactgttttcttgagagtagcagaggattagaaaaagtcctccataaattatgtaaccggccttcctgactagcctgactcaagcaatgtaagagataattattctgttttcataatttataagtgtgggggcatgcctcagcataaaaacaacctattagggaaaaatatctaatagattacctttatcgcctgttagggttttatgttgtttttaactcagatgccataagaacaaagatacatgtaatttataatagtaatcattaatacctatattgtgctttaaggtttacaaaataatttttctcatactttatcttagtttagtttcttgacagtccatgaggtaaggtggtagctttatcaccattttacaaagtgggaaacgaaggttcctcttaggaacctagttgtcacctttgtataataaaacttcgaagctcggagctgttaactggtttgctgaaggcttagctgtaagagccagaattcagacccaggtctgagtgacttcaaactgcacagtccttcccattattacccatatgctatcccttatatttttaatttattaggaattcattcatttataaacttggtgattcacctttattagattctggtcgctgaaggctttagtaacttcagagtaaaacttgagagatgagatgtaaaatgcagccattcttgagagttcctttttctgtaacattcatcaacacttcattgagaagtgaaggttcctatggctgtctctaccttcaagaggcttagctttagtcactgagaaagacaaggaaactaatgatagaatatagtagcttcttctggcgttaggtatcacagagtcacagctagttacagctagccctttattattgaaagaagaggagctagcagtcccactatcagaattaagactagagatggtaataggagctagtatcagaaaagcttaaggcaaagcataaagtgtaggctagaatgaagctggagaatggggagggggcttgggtaacatccagaacctggctggggacctggaactacatgagatgtaagaatggagaggttctagcagtcagaggtcaggtacaaatgaacagctgggatctgcgcatggcagacagtgaaaaaacccaggcaagcaaaatggtcagagcagaaaggggcccaaggccacgttcttgagatgtggagggggctgaggaagccacgccaagtaaggacagatgcagctcagcagttcctagcgagccctgacaagccagctcagctgaagcttcgggtgggagccagtcatggcacagtggagtgaaggaagagcagtttcaggcacccaaaacctgacccccacgacctgttttccacctgaagagccacccattccatccaaacccttggcaaaagtctgctaacagagagaaccggccagtatgctggccagtcgcgatcatgcctgtctttaccctctaagctgaagctgctcatcaacggtgagatggcaaaaaggtgggtccagaagaggggaaaagaagggagtctgtgaaaacaaaatgctgaagaatctgcatcaaataaacccttccttccttcctttttccttca

SEQ ID NO: 429 - DNA, 7825 bp, Homo sapiens
aacaactggtgcgcatgcgcactggtgtctcgcggcctggcgcgccccctccgaagcgcatgctcgtgggcacgcacgagcctcaagatccaaggtgcgcgcgtcggcgtccgaggcggttggtgtcggagaatttgttaagcgggactccaggcaattatttccagtcagagaaggaaaccagtgcctggcattctcaccatctttctacctaccatgatcaagtgcttgtcagttgaagtacaagccaaattgcgttctggtttggccataagctccttgggccaatgtgttgaggaacttgccctcaacagtattgatgctgaagcaaaatgtgtggctgtcagggtgaatatggaaaccttccaagttcaagtgatagacaatggatttgggatggggagtgatgatgtagagaaagtgggaaatcgttatttcaccagtaaatgccactcggtacaggacttggagaatccaaggttttatggtttccgaggagaggccttggcaaatattgctgacatggccagtgctgtggaaatttcgtccaagaaaaacaggacaatgaaaacttttgtgaaactgtttcagagtggaaaagccctgaaagcttgtgaagctgatgtgactagagcaagcgctgggactactgtaacagtgtataacctattttaccagcttcctgtaaggaggaaatgcatggaccctagactggagtttgagaaggttaggcagagaatagaagctctctcactcatgcacccttccatttctttctctttgagaaatgatgtttctggttccatggttcttcagctccctaaaaccaaagacgtatgttcccgattttgtcaaatttatggattgggaaagtcccaaaagctaagagaaataagttttaaatataaagagtttgagcttagtggctatatcagctctgaagcacattacaacaagaatatgcagtttttgtttgtgaacaaaagactagttttaaggacaaagctacataaactcattgactttttattaaggaaagaaagtattatatgcaagccaaagaatggtcccaccagtaggcaaatgaattcaagtcttcggcaccggtctaccccagaactctatggcatatatgtaattaatgtgcagtgccaattctgtgagtatgatgtgtgcatggagccagccaaaactctgattgaatttcagaactgggacactctcttgttttgcattcaggaaggagtgaaaatgtttttaaagcaagaaaaattatttgtggaattatcaggtgaggatattaaggaatttagtgaagataatggttttagtttatttgatgctactcttcagaagcgtgtgacttccgatgagaggagcaatttccaggaagcatgtaataatattttagattcctatgagatgtttaatttgcagtcaaaagctgtgaaaagaaaaactactgcagaaaacgtaaacacacagagttctagggattcagaagctaccagaaaaaatacaaatgatgcatttttgtacatttatgaatcaggtggtccaggccatagcaaaatgacagagccatctttacaaaacaaagacagctcttgctcagaatcaaagatgttagaacaagagacaattgtagcatcagaagctggagaaaatgagaaacataaaaaatctttcctggaacatagctctttagaaaatccgtgtggaaccagtttagaaatgtttttaagcccttttcagacaccatgtcactttgaggagagtgggcaggatctagaaatatggaaagaaagtactactgttaatggcatggctgccaacatcttgaaaaataatagaattcagaatcaaccaaagagatttaaagatgctactgaagtgggatgccagcctctgccttttgcaacaacattatggggagtacatagtgctcagacagagaaagagaaaaaaaaagaatctagcaattgtggaagaagaaatgtttttagttatgggcgagttaaattatgttccactggctttataactcatgtagtacaaaatgaaaaaactaaatcaactgaaacagaacattcatttaaaaattatgttagacctggtcccacacgtgcccaagaaacatttggaaatagaacacgtcattcagttgaaactccagacatcaaagatttagccagcactttaagtaaagaatctggtcaattgcccaacaaaaaaaattgcagaacgaatataagttatgggctagagaatgaacctacagcaacttatacaatgttttctgcttttcaggaaggtagcaaaaaatcacaaacagattgcatattatctgatacatccccctctttcccctggtatagacacgtttccaatgatagtaggaaaacagataaattaattggtttctccaaaccaatcgtccgtaagaagctaagcttgagttcacagctaggatctttagagaagtttaagaggcaatatgggaaggttgaaaatcctctggatacagaagtagaggaaagtaatggagtcactaccaatctcagtcttcaagttgaacctgacattctgctgaaggacaagaaccgcttagagaactctgatgtttgtaaaatcactactatggagcatagtgattcagatagtagttgtcaaccagcaagccacatccttaactcagagaagtttccattctccaaggatgaagattgtttagaacaacagatgcctagtttgagagaaagtcctatgaccctgaaggagttatctctctttaatagaaaacctttggaccttgagaagtcatctgaatcactagcctctaaattatccagactgaagggttccgaaagagaaactcaaacaatggggatgatgagtcgttttaatgaacttccaaattcagattccagtaggaaagacagcaagttgtgcagtgtgttaacacaagatttttgtatgttatttaacaacaagcatgaaaaaacagagaatggtgtcatcccaacatcagattctgccacacaggataattcctttaataaaaatagtaaaacacattctaacagcaatacaacagagaactgtgtgatatcagaaactcctttggtattgccctataataattctaaagttaccggtaaagattcagatgttcttatcagagcctcagaacaacagataggaagtcttgactctcccagtggaatgttaatgaatccggtagaagatgccacaggtgaccaaaatggaatttgttttcagagtgaggaatctaaagcaagagcttgttctgaaactgaagagtcaaacacgtgttgttcagattggcagcggcatttcgatgtagccctgggaagaatggtttatgtcaacaaaatgactggactcagcacattcattgccccaactgaggacattcaggctgcttgtactaaagacctgacaactgtggctgtggatgttgtacttgagaatgggtctcagtacaggtgtcaaccttttagaagcgaccttgttcttcctttccttccgagagctcgagcagagaggactgtgatgagacaggataacagagatactgtggatgatactgttagtagcgaatcgcttcagtctttgttctcagaatgggacaatccagtatttgcccgttatccagaggttgctgttgatgtaagcagtggccaggctgagagcttagcagttaaaattcacaacatcttgtatccctatcgtttcaccaaaggaatgattcattcaatgcaggttctccagcaagtagataacaagtttattgcctgtttgatgagcactaagactgaagagaatggcgaggcagattcctacgagaagcaacaggcacaaggctctggtcggaaaaaattactgtcttctactctaattcctccgctagagataacagtgacagaggaacaaaggagactcttatggtgttaccacaaaaatctggaagatctgggccttgaatttgtatttccagacactagtgattctctggtccttgtgggaaaagtaccactatgttttgtggaaagagaagccaatgaacttcggagaggaagatctactgtgaccaagagtattgtggaggaatttatccgagaacaactggagctactccagaccaccggaggcatccaagggacattgccactgactgtccagaaggtgttggcatcccaagcctgccatggggccattaagtttaatgatggcctgagcttacaggaaagttgccgccttattgaagctctgtcctcatgccagctgccattccagtgtgctcacgggagaccttctatgctgccgttagctgacatagaccacttggaacaggaaaaacagattaaacccaacctcactaaacttcgcaaaatggcccaggcctggcgtctctttggaaaagcagagtgtgatacaaggcagagcctgcagcaatccatgcctccctgtgagccaccatgagaacagaatcactggtctaaaaggaacaaagggatgttcactgtatgcctctgagcagagagcagcagcagcaggtaccagcacggccctgactgaatcagcccagtgtccctgagcagcttagacagcagggctctctgtatcagtctttcttgagcagatgattcccctagttgagtagccagatgaaattcaagcctaaagacaattcattcatttgcatccatgggcacagaaggttgctatatagtatctaccttttgctacttatttaatgataaaatttaatgacagtttgattggttgcttggtttgttatttgaagggtgtgatttttgtttttgtacagttttttttcaagcttcacatttgcgtgtatctaattcagctgatgctcaagtccaaggggtagtctgccttcccaggctgcccccagggtttctgcactggtcccctcttttcccttcagtcttcttcacttccctatgctgctgcttcatgtgctacatctcagacttaaagagtttctctactacagtgaaaacattctctagggtctttcatcaggcctttagttattttagggataaaaactattgataaaaaggacaaggatagaacagagaaaatttaaagtcctgttccgggttttttgttatgttttctttaaaaactcagagactgatgttcaatatcccaaaccagtaaaatggtgaaaatactatgagcttgttttttaaaatatgattttttttggtactttataaagtatctctttatgtgaaagcaattgtcatatcaaaacacagcatacatacgttcaacctaaccaaatatctttacactttttctttcaggagacaagggttctttgggtccctttcaaacggtatcttggtgttattacattatgcctatctattgcccttataatatcacttgggaccaggactgatcgttctgcaaatgcttgttatgccattctcaatctatttttcccgcaccttttcacatgatttgtggttaataggactcaacagactaaaattgcatagtagaaaaaaaatgcaaaaagccagctggtaatgtttattgcaactggggtgctatacaattagtaagatgatgcaatgagaatttctacttttgtatttcctgaccagcctgctcaaagtggcttttatatcaattgaatgattttcctcattttttaatacaggaaaccaattcgtgctcatggaagaaaagttcctttgccagcagccttgaagtgaatcttacaggagcaatgaaagtattgcattcattagcgtctgccccagagaaggttcagagaaaaccttcacttgttttcaaggggatccttgtagatttacgtaattggaatcctgaagaacaggccctactgtctaaaaaatggcttttattcttctaaatacatataaacggatgttttatagatgggaagacatgaccttagaaaggagagagttttcagaggatttgccaggctgtcaggggctctgcctccaggcccagtgtggcagtgtggcctcagggcctccgcctccctgcttgagggctgcatggaggccaactgtcctgggagttgtaaaaatcttttaaggccagaccaatttgagggattttaaaaagtgtctcagtgcctcttatgatttcagaaggttttgctatatgtaatcccaactactgttttcttgagagtagcagaggattagaaaaagtcctccataaattatgtaaccggccttcctgactagcctgactcaagcaatgtaagagataattattctgttttcataatttataagtgtgggggcatgcctcagcataaaaacaacctattagggaaaaatatctaatagattacctttatcgcctgttagggttttatgttgtttttaactcagatgccataagaacaaagatacatgtaatttataatagtaatcattaatacctatattgtgctttaaggtttacaaaataatttttctcatactttatcttagtttagtttcttgacagtccatgaggtaaggtggtagctttatcaccattttacaaagtgggaaacgaaggttcctcttaggaacctagttgtcacctttgtataataaaacttcgaagctcggagctgttaactggtttgctgaaggcttagctgtaagagccagaattcagacccaggtctgagtgacttcaaactgcacagtccttcccattattacccatatgctatcccttatatttttaatttattaggaattcattcatttataaacttggtgattcacctttattagattctggtcgctgaaggctttagtaacttcagagtaaaacttgagagatgagatgtaaaatgcagccattcttgagagttcctttttctgtaacattcatcaacacttcattgagaagtgaaggttcctatggctgtctctaccttcaagaggcttagctttagtcactgagaaagacaaggaaactaatgatagaatatagtagcttcttctggcgttaggtatcacagagtcacagctagttacagctagccctttattattgaaagaagaggagctagcagtcccactatcagaattaagactagagatggtaataggagctagtatcagaaaagcttaaggcaaagcataaagtgtaggctagaatgaagctggagaatggggagggggcttgggtaacatccagaacctggctggggacctggaactacatgagatgtaagaatggagaggttctagcagtcagaggtcaggtacaaatgaacagctgggatctgcgcatggcagacagtgaaaaaacccaggcaagcaaaatggtcagagcagaaaggggcccaaggccacgttcttgagatgtggagggggctgaggaagccacgccaagtaaggacagatgcagctcagcagttcctagcgagccctgacaagccagctcagctgaagcttcgggtgggagccagtcatggcacagtggagtgaaggaagagcagtttcaggcacccaaaacctgacccccacgacctgttttccacctgaagagccacccattccatccaaacccttggcaaaagtctgctaacagagagaaccggccagtatgctggccagtcgcgatcatgcctgtctttaccctctaagctgaagctgctcatcaacggtgagatggcaaaaaggtgggtccagaagaggggaaaagaagggagtctgtgaaaacaaaatgctgaagaatctgcatcaaataaacccttccttccttcctttttccttca

SEQ ID NO: 430 - DNA, 1500 bp, Homo sapiens
gaagactggttggttgggtttggttagtcactaaactagcatatatcaaatgcttaccaggtctgacaaattcgttataaattccactttaaattctcaatgaaaatgagatagaaagcaaaaactaaggactggttaacaattccaaaacactttattctcacagcattctcagagttctgctctcctttagttatttttataactaaaagctgtggtggcactggggagattcaagtcagtgaagagagtcttggtgttgtcatctgtaaattaagagttgagcaaaggccgggtgcggtggctcacgcctgtaatcccaacactttgggaggccgaggcgggcagatcacctgaggtccggagttcgagaccagcctgaccaacatggagaaacccccgtctctactaaaaatacaaaattagccgagtgtggtggcgcatgcctgtaatcctagctactcgggaggctgaggcaggagaatcacttgaaccctggaggcggaggttgcagtaagctgagatcgcaccactgaattccagcctgggcaacaagagctaaactccgtctcaaaaaaaaaaaaaaaaaaaaaaagagttgagttagacagtttctcagccttttccagctccaaatgccataattctaagatggcaggctctggaattattcattcattcggtgcctaccataggccaggcactgttcttggtaactgggatacagcagtaaacaaaatatataaactccttaccttcacatagcttacattctagggagagaagacaataagtaaacacataaaatatatattgaattaaacggtagttaagagcaaaggtgaaaatgagaaaaaaaaggaaagggaaaacacgggaaaaaaaaataaaaacaaaagtaaaagctacgacatagtctttaacaccatgccaaaagggaataaggattgagactgtaggtaccggttcactgaaccctgggatgcggatccttggctggaacaactggtgcgcatgcgcactggtgtctcgcggcctggcgcgccccctccgaagcgcatgctcgtgggcacgcacgagcctcaagatccaaggtgcgcgcgtcggcgtccgaggcggttggtgtcggagaatttgttaagcgggactccaggtgactctgggggaagcacgcgacgaaaagatgatgccggggtctcttctaacaccagaagggccctgatgatggctgcgcgcagctttcggagccggatgcgcgagggccccggaggcccggcggcctggcggccgggcgggcccagtttggggacaaggacggggctggccagggaggggctgggcctggcgggaaggcagcgctgccccggactcggcccgcgcggccctcccaggcccccgtgccctggatccaggcccgtgcgtcccgtcagtcccaggcgctgggaggcgtcatcaggaaatcattgggtttacattaatcggaatacttgttaaacgttt

SEQ ID NO: 431 - DNA, 1153 bp, Homo sapiens
ggcggaggttgcagtaagctgagatcgcaccactgaattccagcctgggcaacaagagctaaactccgtctcaaaaaaaaaaaaaaaaaaaaaaagagttgagttagacagtttctcagccttttccagctccaaatgccataattctaagatggcaggctctggaattattcattcattcggtgcctaccataggccaggcactgttcttggtaactgggatacagcagtaaacaaaatatataaactccttaccttcacatagcttacattctagggagagaagacaataagtaaacacataaaatatatattgaattaaacggtagttaagagcaaaggtgaaaatgagaaaaaaaaggaaagggaaaacacgggaaaaaaaaataaaaacaaaagtaaaagctacgacatagtctttaacaccatgccaaaagggaataaggattgagactgtaggtaccggttcactgaaccctgggatgcggatccttggctggaacaactggtgcgcatgcgcactggtgtctcgcggcctggcgcgccccctccgaagcgcatgctcgtgggcacgcacgagcctcaagatccaaggtgcgcgcgtcggcgtccgaggcggttggtgtcggagaatttgttaagcgggactccaggtgactctgggggaagcacgcgacgaaaagatgatgccggggtctcttctaacaccagaagggccctgatgatggctgcgcgcagctttcggagccggatgcgcgagggccccggaggcccggcggcctggcggccgggcgggcccagtttggggacaaggacggggctggccagggaggggctgggcctggcgggaaggcagcgctgccccggactcggcccgcgcggccctcccaggcccccgtgccctggatccaggcccgtgcgtcccgtcagtcccaggcgctgggaggcgtcatcaggaaatcattgggtttacattaatcggaatacttgttaaacgtttacccgtcagttgctgccggctgcttagtgcattagcttagaaagcagcagaaattctgcagttaagagccctgatttgtcccgagtttggaaaaccggccccaccgcctgcaggggcccacccacgtggctctcactgatggagaagaagggg

SEQ ID NO: 432 - DNA, 4343 bp, Homo sapiens
tttgattcttaaaatttcttcctattgcttcaccttattacaatgtcttagcaattcattataagtatttttctaaaagtcatggttattgtgtaatgtataaatgttatgaaactagcttggacatttttgtcatgaataatttctagctaatgttccttagctgtatttaatttaggcatctgtttttggtgaagtggttagaatttcgaatactgtgtttactggtcaacttcaagtgtaattatgatttcactttaggacatgtgggatttagaaaggagcattgaaaattatgaaattatgaattttttttggatgttaatccattgcaccaagcatgagctgtgcctagagatcagcggtataactttgttttgctttgtttcacaatttggtttaataagagtgatttcatttacctcaagtgctatttcttcataatgctgtgtaatgctaaagctttgattatgtgcgtgtgtggtttttttctccaataggcaattatttccagtcagagaaggaaaccagtgcctggcattctcaccatctttctacctaccatgatcaagtgcttgtcagttgaagtacaagccaaattgcgttctggtttggccataagctccttgggccaatgtgttgaggaacttgccctcaacagtattgatgctgaagcaaaatgtgtggctgtcagggtgaatatggaaaccttccaagttcaagtgatagacaatggatttgggatggggagtgatgatgtagagaaagtgggaaatcgttatttcaccagtaaatgccactcggtacaggacttggagaatccaaggttttatggtttccgaggagaggccttggcaaatattgctgacatggccagtgctgtggaaatttcgtccaagaaaaacaggacaatgaaaacttttgtgaaactgtttcagagtggaaaagccctgaaagcttgtgaagctgatgtgactagagcaagcgctgggactactgtaacagtgtataacctattttaccagcttcctgtaaggaggaaatgcatggaccctagactggagtttgagaaggttaggcagagaatagaagctctctcactcatgcacccttccatttctttctctttgagaaatgatgtttctggttccatggttcttcagctccctaaaaccaaagacgtatgttcccgattttgtcaaatttatggattgggaaagtcccaaaagctaagagaaataagttttaaatataaagagtttgagcttagtggctatatcagctctgaagcacattacaacaagaatatgcagtttttgtttgtgaacaaaagactagttttaaggacaaagctacataaactcattgactttttattaaggaaagaaagtattatatgcaagccaaagaatggtcccaccagtaggcaaatgaattcaagtcttcggcaccggtctaccccagaactctatggcatatatgtaattaatgtgcagtgccaattctgtgagtatgatgtgtgcatggagccagccaaaactctgattgaatttcagaactgggacactctcttgttttgcattcaggaaggagtgaaaatgtttttaaagcaagaaaaattatttgtggaattatcaggtgaggatattaaggaatttagtgaagataatggttttagtttatttgatgctactcttcagaagcgtgtgacttccgatgagaggagcaatttccaggaagcatgtaataatattttagattcctatgagatgtttaatttgcagtcaaaagctgtgaaaagaaaaactactgcagaaaacgtaaacacacagagttctagggattcagaagctaccagaaaaaatacaaatgatgcatttttgtacatttatgaatcaggtggtccaggccatagcaaaatgacagagccatctttacaaaacaaagacagctcttgctcagaatcaaagatgttagaacaagagacaattgtagcatcagaagctggagaaaatgagaaacataaaaaatctttcctggaacatagctctttagaaaatccgtgtggaaccagtttagaaatgtttttaagcccttttcagacaccatgtcactttgaggagagtgggcaggatctagaaatatggaaagaaagtactactgttaatggcatggctgccaacatcttgaaaaataatagaattcagaatcaaccaaagagatttaaagatgctactgaagtgggatgccagcctctgccttttgcaacaacattatggggagtacatagtgctcagacagagaaagagaaaaaaaaagaatctagcaattgtggaagaagaaatgtttttagttatgggcgagttaaattatgttccactggctttataactcatgtagtacaaaatgaaaaaactaaatcaactgaaacagaacattcatttaaaaattatgttagacctggtcccacacgtgcccaagaaacatttggaaatagaacacgtcattcagttgaaactccagacatcaaagatttagccagcactttaagtaaagaatctggtcaattgcccaacaaaaaaaattgcagaacgaatataagttatgggctagagaatgaacctacagcaacttatacaatgttttctgcttttcaggaaggtagcaaaaaatcacaaacagattgcatattatctgatacatccccctctttcccctggtatagacacgtttccaatgatagtaggaaaacagataaattaattggtttctccaaaccaatcgtccgtaagaagctaagcttgagttcacagctaggatctttagagaagtttaagaggcaatatgggaaggttgaaaatcctctggatacagaagtagaggaaagtaatggagtcactaccaatctcagtcttcaagttgaacctgacattctgctgaaggacaagaaccgcttagagaactctgatgtttgtaaaatcactactatggagcatagtgattcagatagtagttgtcaaccagcaagccacatccttaactcagagaagtttccattctccaaggatgaagattgtttagaacaacagatgcctagtttgagagaaagtcctatgaccctgaaggagttatctctctttaatagaaaacctttggaccttgagaagtcatctgaatcactagcctctaaattatccagactgaagggttccgaaagagaaactcaaacaatggggatgatgagtcgttttaatgaacttccaaattcagattccagtaggaaagacagcaagttgtgcagtgtgttaacacaagatttttgtatgttatttaacaacaagcatgaaaaaacagagaatggtgtcatcccaacatcagattctgccacacaggataattcctttaataaaaatagtaaaacacattctaacagcaatacaacagagaactgtgtgatatcagaaactcctttggtattgccctataataattctaaagttaccggtaaagattcagatgttcttatcagagcctcagaacaacagataggaagtcttgactctcccagtggaatgttaatgaatccggtagaagatgccacaggtgaccaaaatggaatttgttttcagagtgaggaatctaaagcaagagcttgttctgaaactgaagagtcaaacacgtgttgttcagattggcagcggcatttcgatgtagccctgggaagaatggtttatgtcaacaaaatgactggactcagcacattcattgccccaactgaggacattcaggctgcttgtactaaagacctgacaactgtggctgtggatgttgtacttgagaatggtaagtacgtagtattcatgtgcatgagatgcttttgaagatgggaatgctggacaaggagtaagatcctcattatccaaagagattatctcaacagatagaacattttgaagaccacttataaaacatatgttgtattttcatgctatatgaagatttgctacgtccaacactacttttttttttttttttttttgagacggagtcttgctctgtcacccaggctggagtgcagtggtgcgatctcagctcactgcaacctctgcccccctggttcaagcgattctcctgcctcagcctccagtgtagcttggattacaagagcatgccaccatgcccagctaaatttttttattttcagtagagacaggatttcactatgttggccaggctggtctcaaactcctagcctcaagtgatccacctgcctcggcctcccagagtgttgggattataggtgtgagcccgcacgcagcctctaggtccaacactatttaaat

SEQ ID NO: 433 - DNA, 1099 bp, Homo sapiens
ggtgaaaccccatgtctactaaaaatacaaaaaaattagccgggtgtggtgacgcatgcctgtaatcccagctactcgggaggctgaggcaggagaattgcttgaacccgggaggcggaagttgcagtaagccgagatcacgccactgtactccagcccgggcgacagagcgagacgccgtctcaaaaaaaaaaaaaagggtctcaagacattgccaatgtcccctcgtgcaaaattgccccccagtgagaatcacagtgacctattctaggtcttcattctgtctggtatgaatagataatggaactaagcattaatatagagtcctatatggacagcataatttcattaaaggatttctgattctcaatctagtgtttagtagtctgctttatgtcttgactcagtttgtgcagaaagaggttttatgtgattaaatttttaaagagtttacttgtattttaagttcacatttctaggtttttctttcttatatttagggtctcagtacaggtgtcaaccttttagaagcgaccttgttcttcctttccttccgagagctcgagcagagaggactgtgatgagacaggataacagaggtaagggtggcagagagtgctggggcacacagtacacatcgtaccacctaactcaaaaaacaaagcaggcttgcattaagcttgatcagtgccagctgtgctgtactggaatcaggaattccccacggccctgtttaacagcggaactaattaattcagcgcatgcatttaggtcagaaattacttttccagacttgaggtcaatatttgctgattatgcatagtctgtggtgtcttgtgattaggggacatgtttcttatttttaaaaaggctggacttgcactccaagttgctgtagttttatgtaagcaaaactcttcaaaaaaagctacagacatcaattttgtgtgtatgtttaaaaatagataaggtatattttgcttaaaggcagtaaggctataaatttgagccatagcttctctgtcagtattccacaatatctcttttaacagtttggagaaaagctgtaatgccagaagatacagtcaccaactctagt

SEQ ID NO: 434 - DNA, 1086 bp, Homo sapiens
aattacttttccagacttgaggtcaatatttgctgattatgcatagtctgtggtgtcttgtgattaggggacatgtttcttatttttaaaaaggctggacttgcactccaagttgctgtagttttatgtaagcaaaactcttcaaaaaaagctacagacatcaattttgtgtgtatgtttaaaaatagataaggtatattttgcttaaaggcagtaaggctataaatttgagccatagcttctctgtcagtattccacaatatctcttttaacagtttggagaaaagctgtaatgccagaagatacagtcaccaactctagtttaaaaagtaacagatcaaaataatttagagatacagcaaacactgaacatttgtagaacatagaaacaatgtacgtgacctttggtcttgaggctatggctcaccaaacaggaaatgccattccctcctttccctgtggttctggatgccaactttacctgttcccttttgccctagatactgtggatgatactgttagtagcgaatcgcttcagtctttgttctcagaatgggacaatccagtatttgcccgttatccagaggtgggtctgtagcagtttttctttgccttttttttttcttcttcttcttcttattttttaaattttgagatggagttttgctcctgttgcccagactgaaatgcaatggcatgatctcggctcacgtaaccttcgcttcccaggttcaagcaattctcctgcctcagtctctcgagcagctgggattacaggcacctgccaccacgcccagcgaattttgtatttttagtagagatggggtttctccatattggtcaggctggtctctaactcccaacctcaggtgatctgcccgcctcagcctcccaaagtcctgggattacaggtgtgagccatcacgcccagcctttctttgcctgttattttaaactttgagtttcaagatgggtacagtggcatgcacttatagtctcagctactcaggaggctgaggtgggaggatcacttgaggccagaagttcaaggctatatagtgtgctgattgcacctgtgactagcca

SEQ ID NO: 435 - DNA, 1105 bp, Homo sapiens
gtaagactcattattcataaattcttttgaatttttttttttttttttttttttttttttttttttgtgacagagtcttgctgtgtcgcccaggctgaagtgcagtggcgtgatctcagctcactgcaagctccgcctcccgggttcacaccattctcctgcctcagtctcccaagtagctgggactaaaggcgcctgccgccacgcccagctaattttttgtattttttagtagagatggggtttcaccatgttagccaggatggtctcgatctcctgacctcgtgatctgcccgcctcagcctcccaaagtgctgagattacaggtgtgagccaccacgcccggccgattcttttgaatttctataaattccctgaattaaacccacctctagtaggctaaataaaaatgaatgcttttaaagcactctgatatctttggtaaaacaattctgacacaaaaattaaaatttcaattatattttgctgagtctttctaggttgctgttgatgtaagcagtggccaggctgagagcttagcagttaaaattcacaacatcttgtatccctatcgtttcaccaaaggaatgattcattcaatgcaggtaaaagattaacttcaaaatctcataaatatatatatatatatatatatatatatatatatatggcctaactcttctaaaatttgatttatttaatgatatagaccaccttggtcaaggcacgtgtgtgtgtgtgtgtgtgtgtgtgtgttcttactagaacttttatcatcagaagaaaaagcaagggattaattataattacaaagaaagaaatatctttagtagtgtaagtaggtttggagggaatgaattatggattcaggctgacagtttcaaggattctcaaggttctcctgcagaagattatatattgactttatatttggcaataatttataaatcaaagtcctttagtgaccttgtccttaagtgtgcaacagtgcccttttagaaattaccttctattgtgtgagcctacacaggtttgggaaagcccatattgagaagtcatttcacaaaagggaccctttgtctgatctgcttttctattttgcctt

SEQ ID NO: 436 - DNA, 1073 bp, Homo sapiens
gagccgagatcacaccattgcactccagcctgggtgacaaagtgagactccgtctcaaaaaaaaaaaaattaaaaataaataaaaataaaaatagactagtttctccataatcgttttccttgctttcatataaattttaaaaatttatttcagcctgtatgttagcaatctctggtcacattacctattctcaagagtcactctgttgggaacatctcaggccttctctaaagtattgctagcacaccactctgagacgtgggagtctgtcttcccctgtcgcctccctccccttacatcttctgatcaactccacctgcccattctttcatccttcctagtgactttttctggttcatcagaaccttacccagtctcaaagaaaggagtgtgataaggcaaacaactctaaataaaatacagttctgtatctttctatgcaaataagcctttgttaatttttatttagtgttgtaccacttatttgaatgtctgacaggttctccagcaagtagataacaagtttattgcctgtttgatgagcactaagactgaagagaatggcgaggcaggtaagaatggagtttagcctgaatgattaaccagctggtcttcttgtaacctttttttaatgattatttttggtatataatatagtttcaatgatttggatggattagggaaagccaatctaaaactaagaatattatgaaggctgggtgcggtggctcacacctgtaatcccaacactttgggaggtgaggcaggtggatggcttgaggccaggagttcaggaccagcctgagcaacatggcaaaaccccgtctctactaaaaatacaaaaattagctgggcatggtggtgtgcacctgtagtcccagctactcaggaggctaaggcacaagaatcgcttgaacttgggaggcagaggatgtagtgagccgagattgcgctattacactccagcctgggcgacagacatttagttttatgttcatacacatacatatactcaggatgcacattaaactatcaagagtatttactttgggagtgaaaatgagggtgtgca

SEQ ID NO: 437 - DNA, 1072 bp, Homo sapiens
gatttcttgacctcatgatccgcccgcctcagcctcccagtgtgctgggattacaggtgtgagacactgcacccagccctgactatgttttctaaatgagatgctggtgaactaaagagtttcttagtttaccttttgtttcctaaaaaatgaaattatggggaaaataataaaacttataggataaaaattagtaatactggtaatctctggagagagaaactagaaggggtgggggcaagagtataaaggagactttattaaattcccttttgtgcctttcagaattggatctgggattcaaacatatgggataagtttgctatcattttccccataatttcatgttttaggaaataaaagatacaattgttactcctcagaatgttttgtcttatgctgttgttagatagtttgaattaagtcttctctgtcctcaacacacatgatggttgtcgtcttgctctgagaatcaaagttcacaatccttgctcatctaggtgggaacctgctcgtgctggtggatcagcacgctgcccatgagcgtatacgtctggagcagcttatcattggtaaggatctgtttgcagccagaaaaaatttgagactcccagcagaatcagtacacctcaaagagcttttctaactgcaactgttgtgagaaagcacactttgtactgtatgttcaaaaattaaactaaagtcctgcagtttggcctgtgttataattgaaagaatgtggtagttcactaattgaaagatgtgaacttatttatgtggtcagaggcatatttgccagatgttattaacaacccagaagtacgcaaggataggctgcttactctgacatccagcacaaagctctgcccctccatatgcccggtgatcttggcatgccttcccacactccatcaggcagagaccagtggcagctcagaaggcccagtatgctgttttgattttaaaatttagtttgcttttgaatatgcagtataatcaaatagatccaattctgaaaggcacaaaagggaatataataaagtctcctttctatccttgtccccacccctcc

SEQ ID NO: 438 - DNA, 1112 bp, Homo sapiens
ttttcacttttccttataaaatgacggcctaagagttgggaaagatatagtaaaaacagtgttagaaaaacttacctctacaggccctgcaccatttgagaatagtactaattctctccagagactgggagaccctgctcaaggaaagggaagccttctggagccataagactgtgtggtcaacccacatatgttcctggtaatccacattattcacctctgtcatcaaaacaacatttattaactacaggaacattggcttgttcatctgaatgtaagatgcaagtcttatatttcttattttgaaaaatactaccaaaattgttaataggctgaatatttattagtttgactttaaaaatggaaatccaaaatctaaaactgaacattaaacattctgctttgcattagaatgattatctcaaggccgtgctttatttttatctgaatctagaagacttcccttcctactcttaacccattcatctttctgccaatagattcctacgagaagcaacaggcacaaggctctggtcggaaaaaattactgtcttctactctaattcctccgctagagataacagtgacagaggaacaaaggagactcttatggtcagtaccaccatgagaatgtgatgttgatggtatcaattctcacaataattctgtgaggaataagcataactattgttccatttctcagatgagaccaagagaggttacaagacttgtctaaggtcatagcagttattaagtagtggagcaggcactcaaaggcaggtcgtctgactccacaggctgtttgtttccttttttaaaatatatttttttctgcatccaatcatccattaaaatatttattttgtgagacatggtctcactctgttgtccaggctggagtgcagtggcacaatctctgctcactgcaacctccaccttccaggctcaagcagtcctcccacttcagcctcccaagtacctggaactacaggtgagcaccaccatgctggactaatttttgtaattttttggtagagatgggttttcgccatgttacccaggctggtctgaactcctaggctcaagcgatcctcccactttggcctcccaaa

SEQ ID NO: 439 - DNA, 1160 bp, Homo sapiens
ctcccaatatgtttcaggtttgggaatatgatactgccagtaaatctttttttccctatgacataatttatattagaggcagatctatttacttacatcccgttagtcaggacttctcaattccttgggctgttaattacctccctgctttaatgctgattcaaatcactctcagaccttttcttcatgccagactcccttaagtgccagcagccagaagttagcagttcctcaatgaagaaaacacacttagaaacaagacttagacacagattgattcccaatggaaaagagaaaaacaataaaggttactgtaattcaaaaaggaaatttgataataaaaaatcccaaacacccacacataagtgtgagaaaaacaatacggttgttaagccctgtggcagcttttgaaaaactattaagtagtatttggaaccagtagtgaagtgcaaatgaagtagcactctttttttttttaacatttgaggttatctctttaggtgttaccacaaaaatctggaagatctgggccttgaatttgtatttccagacactagtgattctctggtccttgtgggaaaagtaccactatgttttgtggaaagagaagccaatgaacttcggagaggaagatctactgtgaccaagagtattgtggaggtaagacacagctgcagatgttaaggaaattgctgagtgatggtaacctcatattttgtctgtagattctctgaattcatcttttcttcaacaagtattcatggtatttacctgcggtgtgccaggagctagaaattcagagatgagttagctcaaaataaggaagaagggcatttaaagaattatagtcagtgaactttggctagtagaggtatgtgttttgctttcttcccagtgataaaggtaatgaaaactaagagtctagaatgcaccaagatagtttttcagaagtgttatggaaacacagaatgacttgtgtgcctggggaggtgaagtcaatgaaaatgtcacagaaaagctgttttcttaagaaaagtttttacttttgagagaccaggtctcactctgttgcccaagctggagtgcagtggtgcaatcatagctcactgtagccttgatctcctgggcacaagcaatcttcctgcctcagcctcccaagt

SEQ ID NO: 440 - DNA, 1024 bp, Homo sapiens
ccaaaaagcccgtgggaactaaagtgactgtttacttatgtttatgatatttaagcaagtgttatactgagcagtggttgtgttgatggttgttgtgtatttattctcagtttgtgtgtaatattacgcttgttctggctaagattacacacacaaacagacagccttttagtgagaagccttcctgatgttttgaattggttgaatcatcaaggctactctcaccagctacataacctcattagttgagaagctatctctggaggaagtctcagtagctaaatatattctgtgttcaataagagttctattcagttgcttggttttttcatattcaaagtgccttacaacaaataaatttgtacccaagtgctgtattgctggaactctttctttcaggaggcatgatttaaagaagaaaattgagatattttgtaaactatcaaagggcaagtaaaacataaccgtagattaaagccgattttccttttgctttgcaggaatttatccgagaacaactggaggtaagcttttcctttattttggggtttcacacagaagcaccacacataaaaggcttcgttgttccgttttcttttcctgttaataacgtgtttatgcattagctactccagaccaccggaggcatccaagggacattgccactgactgtccagaaggtgttggcatcccaagcctgccatggtaagcccttcaacatagcagtgatcaaacacctctgcatgcagagccctggcagggctgccgggattacaaaagaggcagagggtacatttactacttgactcttggagaatacaatttagatcaagaaactgaatatacccttttaaaaatcacttttacaaaaacaaaatcccaacacaaaaatttgactatagtgctgcctgacctatatgagtggaggaataactcctagaggagatgcattttgagatgaattttgaatgagctggggaacatgggttcatagcatggaaaggggaattcactatagggagag

SEQ ID NO: 441 - DNA, 1079 bp, Homo sapiens
cgcttgttctggctaagattacacacacaaacagacagccttttagtgagaagccttcctgatgttttgaattggttgaatcatcaaggctactctcaccagctacataacctcattagttgagaagctatctctggaggaagtctcagtagctaaatatattctgtgttcaataagagttctattcagttgcttggttttttcatattcaaagtgccttacaacaaataaatttgtacccaagtgctgtattgctggaactctttctttcaggaggcatgatttaaagaagaaaattgagatattttgtaaactatcaaagggcaagtaaaacataaccgtagattaaagccgattttccttttgctttgcaggaatttatccgagaacaactggaggtaagcttttcctttattttggggtttcacacagaagcaccacacataaaaggcttcgttgttccgttttcttttcctgttaataacgtgtttatgcattagctactccagaccaccggaggcatccaagggacattgccactgactgtccagaaggtgttggcatcccaagcctgccatggtaagcccttcaacatagcagtgatcaaacacctctgcatgcagagccctggcagggctgccgggattacaaaagaggcagagggtacatttactacttgactcttggagaatacaatttagatcaagaaactgaatatacccttttaaaaatcacttttacaaaaacaaaatcccaacacaaaaatttgactatagtgctgcctgacctatatgagtggaggaataactcctagaggagatgcattttgagatgaattttgaatgagctggggaacatgggttcatagcatggaaaggggaattcactatagggagagtaaacagcctgtgcagagaggcagaacagaaacaagttagttatatgagaagcagcaaagagtatcaagaaactaggcaggtaagagaacagaaacctagaaggtcacagcaaaacctttggatttgatacagaaggcattagaattagcaagcgttctttttttatctttccaactttca

SEQ ID NO: 442 - DNA, 1152 bp, Homo sapiens
agccttagtttcatccatggtcataagcactaatttatttccctctttttttttttttttttttttttttgagaacggagtctcgctttgttgcccaggctggagtgcagtggcgtgatctcggctcactgcaacccccgcctcctgggttcaagtgattcttctgcctcagcctcccaagtagctgggactataggcgcgtgccaccacacccggctaatttttgtatttttagtagaggcgggatttcaccatattggccaggctggtcttgaactcctgacctcatgatctgcccgcctcagcctcccaaagtgctgggattacaggtgtgagacaccatgcccggcctataagcaccaatttcaagcaggattaaagcttcattaaagaagcctaagaaacatgttactttttccagatatttggcagtgacccaaggtcagcattggtttcccactatatacactataaccttcttgtttctgtctttcatttaggggccattaagtttaatgatggcctgagcttacaggaaagttgccgccttattgaagctctgtcctcatgccagctgccattccagtgtgctcacgggagaccttctatgctgccgttagctgacatagaccacttggaacaggaaaaacaggtacattaatgactaacaggagcaggagggagcaaagtttattttctctttcttttctggcttttactatgcaactgtaatctgtcttaacctttccaaaataggagagttttgcaaaatctgcactggaagtttcacataaagcctcacccatttcattttccagctcaaatccaaaatggaacttagactgaactgtcaggtcacctacataatggctttgtattttaaaacttaacacatgtacagacttatgtaccctgaatatctattgcctgctggctctaggtttcataatatgcagttctttctgaagctactgaaagttggtagaagcacagcaaattcactgttggcaatatagagcctcaacttccagtttcttgatagtacctgctggaaacggtgatctgtgactgtagctggccatccccaaggatcttgagttatggtttgaggatcatcagacagggacccaagcttggggatctctacattat

SEQ ID NO: 443 - DNA, 4438 bp, Homo sapiens
gctgagagctgggaatctagacttaaagttctgagtccccttggatccttaaaacaatctgtaatctctattgaatccagaagttagaaatctaaacagattataacagccagactttggaaatatttgtatgctacctacattttcaattttttttttttgagacggagtctcactctgtcgcccaggctggagtgcagtggcatgatcttggctcaccacaacctccgcctcccaggttcaatcaattctcctgcctcagcctcctgagtagctgggattataggcatgcgccaccacacccggctaatttttttttgtatttttagtagagacagggtttcaccatattggccaggctggtctcaaactcctgaccttgtgatccgcctgccttggcctcccagagtgctgggattacaggtgtgagtcacctcgcccagcctgtatgctacctaccttttcatattgctaattgaagttattctttcttcccatagattaaacccaacctcactaaacttcgcaaaatggcccaggcctggcgtctctttggaaaagcagagtgtgatacaaggcagagcctgcagcaatccatgcctccctgtgagccaccatgagaacagaatcactggtctaaaaggaacaaagggatgttcactgtatgcctctgagcagagagcagcagcagcaggtaccagcacggccctgactgaatcagcccagtgtccctgagcagcttagacagcagggctctctgtatcagtctttcttgagcagatgattcccctagttgagtagccagatgaaattcaagcctaaagacaattcattcatttgcatccatgggcacagaaggttgctatatagtatctaccttttgctacttatttaatgataaaatttaatgacagtttgattggttgcttggtttgttatttgaagggtgtgatttttgtttttgtacagttttttttcaagcttcacatttgcgtgtatctaattcagctgatgctcaagtccaaggggtagtctgccttcccaggctgcccccagggtttctgcactggtcccctcttttcccttcagtcttcttcacttccctatgctgctgcttcatgtgctacatctcagacttaaagagtttctctactacagtgaaaacattctctagggtctttcatcaggcctttagttattttagggataaaaactattgataaaaaggacaaggatagaacagagaaaatttaaagtcctgttccgggttttttgttatgttttctttaaaaactcagagactgatgttcaatatcccaaaccagtaaaatggtgaaaatactatgagcttgttttttaaaatatgattttttttggtactttataaagtatctctttatgtgaaagcaattgtcatatcaaaacacagcatacatacgttcaacctaaccaaatatctttacactttttctttcaggagacaagggttctttgggtccctttcaaacggtatcttggtgttattacattatgcctatctattgcccttataatatcacttgggaccaggactgatcgttctgcaaatgcttgttatgccattctcaatctatttttcccgcaccttttcacatgatttgtggttaataggactcaacagactaaaattgcatagtagaaaaaaaatgcaaaaagccagctggtaatgtttattgcaactggggtgctatacaattagtaagatgatgcaatgagaatttctacttttgtatttcctgaccagcctgctcaaagtggcttttatatcaattgaatgattttcctcattttttaatacaggaaaccaattcgtgctcatggaagaaaagttcctttgccagcagccttgaagtgaatcttacaggagcaatgaaagtattgcattcattagcgtctgccccagagaaggttcagagaaaaccttcacttgttttcaaggggatccttgtagatttacgtaattggaatcctgaagaacaggccctactgtctaaaaaatggcttttattcttctaaatacatataaacggatgttttatagatgggaagacatgaccttagaaaggagagagttttcagaggatttgccaggctgtcaggggctctgcctccaggcccagtgtggcagtgtggcctcagggcctccgcctccctgcttgagggctgcatggaggccaactgtcctgggagttgtaaaaatcttttaaggccagaccaatttgagggattttaaaaagtgtctcagtgcctcttatgatttcagaaggttttgctatatgtaatcccaactactgttttcttgagagtagcagaggattagaaaaagtcctccataaattatgtaaccggccttcctgactagcctgactcaagcaatgtaagagataattattctgttttcataatttataagtgtgggggcatgcctcagcataaaaacaacctattagggaaaaatatctaatagattacctttatcgcctgttagggttttatgttgtttttaactcagatgccataagaacaaagatacatgtaatttataatagtaatcattaatacctatattgtgctttaaggtttacaaaataatttttctcatactttatcttagtttagtttcttgacagtccatgaggtaaggtggtagctttatcaccattttacaaagtgggaaacgaaggttcctcttaggaacctagttgtcacctttgtataataaaacttcgaagctcggagctgttaactggtttgctgaaggcttagctgtaagagccagaattcagacccaggtctgagtgacttcaaactgcacagtccttcccattattacccatatgctatcccttatatttttaatttattaggaattcattcatttataaacttggtgattcacctttattagattctggtcgctgaaggctttagtaacttcagagtaaaacttgagagatgagatgtaaaatgcagccattcttgagagttcctttttctgtaacattcatcaacacttcattgagaagtgaaggttcctatggctgtctctaccttcaagaggcttagctttagtcactgagaaagacaaggaaactaatgatagaatatagtagcttcttctggcgttaggtatcacagagtcacagctagttacagctagccctttattattgaaagaagaggagctagcagtcccactatcagaattaagactagagatggtaataggagctagtatcagaaaagcttaaggcaaagcataaagtgtaggctagaatgaagctggagaatggggagggggcttgggtaacatccagaacctggctggggacctggaactacatgagatgtaagaatggagaggttctagcagtcagaggtcaggtacaaatgaacagctgggatctgcgcatggcagacagtgaaaaaacccaggcaagcaaaatggtcagagcagaaaggggcccaaggccacgttcttgagatgtggagggggctgaggaagccacgccaagtaaggacagatgcagctcagcagttcctagcgagccctgacaagccagctcagctgaagcttcgggtgggagccagtcatggcacagtggagtgaaggaagagcagtttcaggcacccaaaacctgacccccacgacctgttttccacctgaagagccacccattccatccaaacccttggcaaaagtctgctaacagagagaaccggccagtatgctggccagtcgcgatcatgcctgtctttaccctctaagctgaagctgctcatcaacggtgagatggcaaaaaggtgggtccagaagaggggaaaagaagggagtctgtgaaaacaaaatgctgaagaatctgcatcaaataaacccttccttccttcctttttccttccatccctctcttcattcagcaaatcttcagtgagttcctttctaaatgtattgtatcagaacttgtgggggatataaagaaaaaaaagaggttatcacatggcttaggatgtttccaacccttggatcattttcaccccaggcccattagttacagagcactcagtcttacccagaagcatcggatatagtccaggcaaccggatccaagcgtgtgggaatcgcagtgtgctgcatgtgggaatctatcaggccaggatgattcaagcagcagcctgcagaagtgggatttggccagccttgcctgactctggccttccaacttgctcttatctacttccaaagtaaggaatgccccatgatgggccgagcagtccaaaaaaagtggcttggagttagctaccgcaattagcagtttctcattattcaacactgcattacctctttttcatattaactgcagaattttatttttatgtatttattatccttccaaaccca

SEQ ID NO: 444 - DNA, 1500 bp, Homo sapiens
tgggatctgcgcatggcagacagtgaaaaaacccaggcaagcaaaatggtcagagcagaaaggggcccaaggccacgttcttgagatgtggagggggctgaggaagccacgccaagtaaggacagatgcagctcagcagttcctagcgagccctgacaagccagctcagctgaagcttcgggtgggagccagtcatggcacagtggagtgaaggaagagcagtttcaggcacccaaaacctgacccccacgacctgttttccacctgaagagccacccattccatccaaacccttggcaaaagtctgctaacagagagaaccggccagtatgctggccagtcgcgatcatgcctgtctttaccctctaagctgaagctgctcatcaacggtgagatggcaaaaaggtgggtccagaagaggggaaaagaagggagtctgtgaaaacaaaatgctgaagaatctgcatcaaataaacccttccttccttcctttttccttccatccctctcttcattcagcaaatcttcagtgagttcctttctaaatgtattgtatcagaacttgtgggggatataaagaaaaaaaagaggttatcacatggcttaggatgtttccaacccttggatcattttcaccccaggcccattagttacagagcactcagtcttacccagaagcatcggatatagtccaggcaaccggatccaagcgtgtgggaatcgcagtgtgctgcatgtgggaatctatcaggccaggatgattcaagcagcagcctgcagaagtgggatttggccagccttgcctgactctggccttccaacttgctcttatctacttccaaagtaaggaatgccccatgatgggccgagcagtccaaaaaaagtggcttggagttagctaccgcaattagcagtttctcattattcaacactgcattacctctttttcatattaactgcagaattttatttttatgtatttattatccttccaaacccagtgttgtaggaagaatattacatataaatgataacttaggaatcttgtcaagtttttgtttcttcagcactaagtagcttattttctaggcaggtcttaattctaaatgtaacatgcttgaaaaaaacactattgaaaggatccgtctcttcagcatagtatttaatatacatatcaggcaatcaccatctcaagcatgattagactcaagtgctgccctccatcgtgtgagggatgctgggagactggaagcttagactttagctctttaagttggtgcaaaagcaattgcagtttttactattaataataataattgcctagccattgtgcagtaccttgcaagagctctttggcaaatgaaagaataattcaaagcaaagtaggccagatataaaacacttccaaatcacatttcaaaattgttctttcatgtcaactaggtgcatgtctgctaagggagtttttgcaaggacaggtggatagtgtgaggcctttac

SEQ ID NO: 445 - DNA, 5135 bp, Homo sapiens
acgttatccatgaagtgtcgcgagagaaacggacgccgttctctcccgcggaattcaggtttacggccctgcgggttctcagagaatttctagaatttggaatcgagtgcattttctgacatttgagtacagtacccaggggttcttggagaagaacctggtcccagaggagcttgactgaccataaaaatgagtactgcagatgcacttgatgatgaaaacacatttaaaatattagttgcaacagatattcatcttggatttatggagaaagatgcagtcagaggaaatgatacgtttgtaacactcgatgaaattttaagacttgcccaggaaaatgaagtggattttattttgttaggtggtgatctttttcatgaaaataagccctcaaggaaaacattacatacctgcctcgagttattaagaaaatattgtatgggtgatcggcctgtccagtttgaaattctcagtgatcagtcagtcaactttggttttagtaagtttccatgggtgaactatcaagatggcaacctcaacatttcaattccagtgtttagtattcatggcaatcatgacgatcccacaggggcagatgcactttgtgccttggacattttaagttgtgctggatttgtaaatcactttggacgttcaatgtctgtggagaagatagacattagtccggttttgcttcaaaaaggaagcacaaagattgcgctatatggtttaggatccattccagatgaaaggctctatcgaatgtttgtcaataaaaaagtaacaatgttgagaccaaaggaagatgagaactcttggtttaacttatttgtgattcatcagaacaggagtaaacatggaagtactaacttcattccagaacaatttttggatgacttcattgatcttgttatctggggccatgaacatgagtgtaaaatagctccaaccaaaaatgaacaacagctgttttatatctcacaacctggaagctcagtggttacttctctttccccaggagaagctgtaaagaaacatgttggtttgctgcgtattaaagggaggaagatgaatatgcataaaattcctcttcacacagtgcggcagtttttcatggaggatattgttctagctaatcatccagacatttttaacccagataatcctaaagtaacccaagccatacaaagcttctgtttggagaagattgaagaaatgcttgaaaatgctgaacgggaacgtctgggtaattctcaccagccagagaagcctcttgtacgactgcgagtggactatagtggaggttttgaacctttcagtgttcttcgctttagccagaaatttgtggatcgggtagctaatccaaaagacattatccattttttcaggcatagagaacaaaaggaaaaaacaggagaagagatcaactttgggaaacttatcacaaagccttcagaaggaacaactttaagggtagaagatcttgtaaaacagtactttcaaaccgcagagaagaatgtgcagctctcactgctaacagaaagagggatgggtgaagcagtacaagaatttgtggacaaggaggagaaagatgccattgaggaattagtgaaataccagttggaaaaaacacagcgatttcttaaagaacgtcatattgatgccctcgaagacaaaatcgatgaggaggtacgtcgtttcagagaaaccagacaaaaaaatactaatgaagaagatgatgaagtccgtgaggctatgaccagggccagagcactcagatctcagtcagaggagtctgcttctgcctttagtgctgatgaccttatgagtatagatttagcagaacagatggctaatgactctgatgatagcatctcagcagcaaccaacaaaggaagaggccgaggaagaggtcgaagaggtggaagagggcagaattcagcatcgagaggagggtctcaaagaggaagagcagacactggtctggagacttctacccgtagcaggaactcaaagactgctgtgtcagcatctagaaatatgtctattatagatgcctttaaatctacaagacagcagccttcccgaaatgtcactactaagaattattcagaggtgattgaggtagatgaatcagatgtggaagaagacatttttcctaccacttcaaagacagatcaaaggtggtccagcacatcatccagcaaaatcatgtcccagagtcaagtatcgaaaggggttgattttgaatcaagtgaggatgatgatgatgatccttttatgaacactagttctttaagaagaaatagaagataatatatttaatggcactgagaaacatgcaagatacaggaaaaatgaaaatgttacaagctaagagtttacagtttaagattttaagtattgtttcctgagcataactccataagtaagaaatttctagttcacagacatacaatagcattgattcaccttgtttttttaacctggttgttgtagtaagagctttgtttcaatatcactcttgagtaaagattaaaataaagctaccattttacatttctatttcataatgaaaaactatgtcagtattttaatatggttacatttagccaaagttgagggaaagagcttataaaatttaacttcttcataattttagtaatttcctagaggttctgggttttctgaaagtaaaacaatttatgcgaacctatgtctaaattcactgtttgttactatgtatgtttttttccaatgcttcttataagactaaatgattagaagtacctaatagtttgaacagatatgtttttatttaaaagagtagaataacctttcagaattactgagttttttattccagttgtagcaaagatttcaaaagattgtgttcccattaagtggtagtaatttcctttattattctgtatccttaatggtgttctctctctctctctctctctctctctctccctctcccccccgttccccactcttcctttctcctttgctttttcttctctttcatacatatatgcgtgcctagttctaggaggaaacgggttaaaaattgttttaaactacatcttgaaaatattgaagaatttgttttaggtagagtggtcagttgaaccttacagtaaagtatagaaatatatttaatgtggaatgtcaatgccaggatttctcattaacaatattttatctcaactttggttcctgtgatacatttctgaatgggcaattccagaaatcttagtagcccatgttaagcttctattttttacttgttttcggggagaaataagaattagacatcttcagatttaagttaaataatcccattctttataatcctctgtaaaaagatccctgagattattccttcttctagttttatgcgacagctttactttaaaattcaagttatacatcttgggagtacaatggcccgacatttcttcataggtagaaacaaatacttgactcagtgatactcatgaccattagaatagtcatacctggaatgtgtcaaattataagagacagacacttggttagtggctgcctcatatagcacttttgaagaggcctaagtcaaaacttgcaatataacattctattgactttcttaaaaatattttttctgtacctaacttgagcataagggttatttgagcaagtaacattaactcagtggaaggcattgtcctgtgaaatattcttaggcagatctgcccacatctttattgaacttgaaatctaatatttctagtatttgaacaaagcagaaggttaagtcagggaagagcagtgctgtccatgatgtaatggaagctaccaggggaggcagtgtctggatgatgctgtgctacctacccctgcacaagccatgctggctcagtctgagctgtgggccacatcagctagtggctcttctcatgcatcagttaggtgggtctgggtgagagttatagtgagggaatggtcactaaagtatcctgacaagttcctaggaaaaaaggaataaagtttttttccttaaaaaaaaaaaaattgctcttggctgtgaaaagaggtactaaatgcgattcagttcaccgctaaggaaagtgatgacatagcagttacagagggtgataaatctctccagctaattcaggtcattttgtgaatactatgtatcaagccctgaaaatatggtaaataaaacgtgacagggaaacctttttttgattgaatattgttacatagttaaatgtgctatatatccttaatattttatattgatcctgcaaaatctgttggttttaggggagttttgttttttgtttctaacaattttcagacctgttggtataggaatgtagaagtctttcagatgatttgaaagcagctgcatttgctcttggaggctttgggagagcaggaatgaaaacattcagaggaagacatctgtagggaattcttctgttacttaccaaagaataagtgtctttctggtgttttatttcctatcataaaaatacaacagtgcatttacaaggttaaagattcctcgaagttctaggaaattcttgaaaatataagtggtgcttagaaaattcaagcatttaggaatgtgacctttaattcaggtatgtaaaagacttttttcccaaacttttaaaagtaggaaatacaataaatacagaaaagtcatatggttgaataaataattataaattgagcactgatggaatccctctacaggtcaagaaatagcgcagtgtcctggatgcccattatattgttttctcctttctgggtaacaagccctaacttctgtaatttaaaagctcctacttttgccacaaggtggtgcttctgccattagacgcagttaggaggatgcaactgcaaatctaaaattacgaagttagtgtagttgcaataaacttagaacatatgcattaatactaaacctatgcagtaataccataattagccttctaatcatgtaatttgctttacttaggtatttcatttggttcagcctgttatggaatttaccagcttgataaatttgcctataaagttttataaagaaaaggaatattttgttttcataaagaggaaaatccattcttaga

SEQ ID NO: 446 - DNA, 5158 bp, Homo sapiens
acgttatccatgaagtgtcgcgagagaaacggacgccgttctctcccgcggaattcaggtttacggccctgcgggttctcagaggcaagttcagaccgtgttgttttcttttcacggatcctgccctttcttcccgaaaagaagacagccttgggtcgcgattgtggggcttcgaagagtccagcagtgggaatttctagaatttggaatcgagtgcattttctgacatttgagtacagtacccaggggttcttggagaagaacctggtcccagaggagcttgactgaccataaaaatgagtactgcagatgcacttgatgatgaaaacacatttaaaatattagttgcaacagatattcatcttggatttatggagaaagatgcagtcagaggaaatgatacgtttgtaacactcgatgaaattttaagacttgcccaggaaaatgaagtggattttattttgttaggtggtgatctttttcatgaaaataagccctcaaggaaaacattacatacctgcctcgagttattaagaaaatattgtatgggtgatcggcctgtccagtttgaaattctcagtgatcagtcagtcaactttggttttagtaagtttccatgggtgaactatcaagatggcaacctcaacatttcaattccagtgtttagtattcatggcaatcatgacgatcccacaggggcagatgcactttgtgccttggacattttaagttgtgctggatttgtaaatcactttggacgttcaatgtctgtggagaagatagacattagtccggttttgcttcaaaaaggaagcacaaagattgcgctatatggtttaggatccattccagatgaaaggctctatcgaatgtttgtcaataaaaaagtaacaatgttgagaccaaaggaagatgagaactcttggtttaacttatttgtgattcatcagaacaggagtaaacatggaagtactaacttcattccagaacaatttttggatgacttcattgatcttgttatctggggccatgaacatgagtgtaaaatagctccaaccaaaaatgaacaacagctgttttatatctcacaacctggaagctcagtggttacttctctttccccaggagaagctgtaaagaaacatgttggtttgctgcgtattaaagggaggaagatgaatatgcataaaattcctcttcacacagtgcggcagtttttcatggaggatattgttctagctaatcatccagacatttttaacccagataatcctaaagtaacccaagccatacaaagcttctgtttggagaagattgaagaaatgcttgaaaatgctgaacgggaacgtctgggtaattctcaccagccagagaagcctcttgtacgactgcgagtggactatagtggaggttttgaacctttcagtgttcttcgctttagccagaaatttgtggatcgggtagctaatccaaaagacattatccattttttcaggcatagagaacaaaaggaaaaaacaggagaagagatcaactttgggaaacttatcacaaagccttcagaaggaacaactttaagggtagaagatcttgtaaaacagtactttcaaaccgcagagaagaatgtgcagctctcactgctaacagaaagagggatgggtgaagcagtacaagaatttgtggacaaggaggagaaagatgccattgaggaattagtgaaataccagttggaaaaaacacagcgatttcttaaagaacgtcatattgatgccctcgaagacaaaatcgatgaggaggtacgtcgtttcagagaaaccagacaaaaaaatactaatgaagaagatgatgaagtccgtgaggctatgaccagggccagagcactcagatctcagtcagaggagtctgcttctgcctttagtgctgatgaccttatgagtatagatttagcagaacagatggctaatgactctgatgatagcatctcagcagcaaccaacaaaggaagaggccgaggaagaggtcgaagaggtggaagagggcagaattcagcatcgagaggagggtctcaaagaggaagagcctttaaatctacaagacagcagccttcccgaaatgtcactactaagaattattcagaggtgattgaggtagatgaatcagatgtggaagaagacatttttcctaccacttcaaagacagatcaaaggtggtccagcacatcatccagcaaaatcatgtcccagagtcaagtatcgaaaggggttgattttgaatcaagtgaggatgatgatgatgatccttttatgaacactagttctttaagaagaaatagaagataatatatttaatggcactgagaaacatgcaagatacaggaaaaatgaaaatgttacaagctaagagtttacagtttaagattttaagtattgtttcctgagcataactccataagtaagaaatttctagttcacagacatacaatagcattgattcaccttgtttttttaacctggttgttgtagtaagagctttgtttcaatatcactcttgagtaaagattaaaataaagctaccattttacatttctatttcataatgaaaaactatgtcagtattttaatatggttacatttagccaaagttgagggaaagagcttataaaatttaacttcttcataattttagtaatttcctagaggttctgggttttctgaaagtaaaacaatttatgcgaacctatgtctaaattcactgtttgttactatgtatgtttttttccaatgcttcttataagactaaatgattagaagtacctaatagtttgaacagatatgtttttatttaaaagagtagaataacctttcagaattactgagttttttattccagttgtagcaaagatttcaaaagattgtgttcccattaagtggtagtaatttcctttattattctgtatccttaatggtgttctctctctctctctctctctctctctctccctctcccccccgttccccactcttcctttctcctttgctttttcttctctttcatacatatatgcgtgcctagttctaggaggaaacgggttaaaaattgttttaaactacatcttgaaaatattgaagaatttgttttaggtagagtggtcagttgaaccttacagtaaagtatagaaatatatttaatgtggaatgtcaatgccaggatttctcattaacaatattttatctcaactttggttcctgtgatacatttctgaatgggcaattccagaaatcttagtagcccatgttaagcttctattttttacttgttttcggggagaaataagaattagacatcttcagatttaagttaaataatcccattctttataatcctctgtaaaaagatccctgagattattccttcttctagttttatgcgacagctttactttaaaattcaagttatacatcttgggagtacaatggcccgacatttcttcataggtagaaacaaatacttgactcagtgatactcatgaccattagaatagtcatacctggaatgtgtcaaattataagagacagacacttggttagtggctgcctcatatagcacttttgaagaggcctaagtcaaaacttgcaatataacattctattgactttcttaaaaatattttttctgtacctaacttgagcataagggttatttgagcaagtaacattaactcagtggaaggcattgtcctgtgaaatattcttaggcagatctgcccacatctttattgaacttgaaatctaatatttctagtatttgaacaaagcagaaggttaagtcagggaagagcagtgctgtccatgatgtaatggaagctaccaggggaggcagtgtctggatgatgctgtgctacctacccctgcacaagccatgctggctcagtctgagctgtgggccacatcagctagtggctcttctcatgcatcagttaggtgggtctgggtgagagttatagtgagggaatggtcactaaagtatcctgacaagttcctaggaaaaaaggaataaagtttttttccttaaaaaaaaaaaaattgctcttggctgtgaaaagaggtactaaatgcgattcagttcaccgctaaggaaagtgatgacatagcagttacagagggtgataaatctctccagctaattcaggtcattttgtgaatactatgtatcaagccctgaaaatatggtaaataaaacgtgacagggaaacctttttttgattgaatattgttacatagttaaatgtgctatatatccttaatattttatattgatcctgcaaaatctgttggttttaggggagttttgttttttgtttctaacaattttcagacctgttggtataggaatgtagaagtctttcagatgatttgaaagcagctgcatttgctcttggaggctttgggagagcaggaatgaaaacattcagaggaagacatctgtagggaattcttctgttacttaccaaagaataagtgtctttctggtgttttatttcctatcataaaaatacaacagtgcatttacaaggttaaagattcctcgaagttctaggaaattcttgaaaatataagtggtgcttagaaaattcaagcatttaggaatgtgacctttaattcaggtatgtaaaagacttttttcccaaacttttaaaagtaggaaatacaataaatacagaaaagtcatatggttgaataaataattataaattgagcactgatggaatccctctacaggtcaagaaatagcgcagtgtcctggatgcccattatattgttttctcctttctgggtaacaagccctaacttctgtaatttaaaagctcctacttttgccacaaggtggtgcttctgccattagacgcagttaggaggatgcaactgcaaatctaaaattacgaagttagtgtagttgcaataaacttagaacatatgcattaatactaaacctatgcagtaataccataattagccttctaatcatgtaatttgctttacttaggtatttcatttggttcagcctgttatggaatttaccagcttgataaatttgcctataaagttttataaagaaaaggaatattttgttttcataaagaggaaaatccattcttaga

SEQ ID NO: 447 - DNA, 1500 bp, Homo sapiens
agatgctaataaataaaagttcacttgtaattatatcaaatatagtaaccttataccacagatcttaccctctcccccaacatgcttttcctttcaataaaaactccctttatataaattttgagtttacagatccagatacaaaaaattatgtacaaaattttactggtatatttagtttaaaaagccaagcctaggcgcatctacccgacttacagttaagaaacaaaactgatgacttgatgatgatattcctgatattccatcaggaatgtcagggtatgtttcctaacttaaagggcatatcctattttgagagagatccgaactatgtcaactccttacaaacaactcagtgataggcggggctataaaccttactggtgaaggaggttcagatagattaaaacaacttgccctagatcaaggacccttcaatggaactgaaagggcagacgttctaattcaaaagttctacattatttttcgctgcactatacatcttactgctctcagcacaaagcagtgcagatgtgctgaactcaaggacctaggggcgacacctgtagagggtctggcgactgggagggagggagaggggatccagctccggcactctgccaccagccgggagctcacaggcccgtgagctccgcctgcggccttccaaacagccaagagcggagaagcggcttcggtcctacctggggaccacgaagcggcctgacctgcagggctcggcctgtgtccacaggctacccacccccacgggctcaggagttcttagatggcgccggtccatcaaaaagcgaggtccgggacagggaataacaacccacctgacagaagggaaaatcgccgccttgcatctcacttccgggttcgtctcctagcctgctcaggattggctcctgcgtgagggcggggcctcgccgctactttccccgccccctcactgcgtgcggtagccaatgagagccgaactggacttgaagcatctacgttatccatgaagtgtcgcgagagaaacggacgccgttctctcccgcggaattcaggtttacggccctgcgggttctcagaggcaagttcagaccgtgttgttttcttttcacggatcctgccctttcttcccgaaaagaagacagccttgggtcgcgattgtggggcttcgaagagtccagcagtggggtaatttaggaatcgcattcgtctcctgtttctgcaggttcccaggcggaagcccagagttaactggaacctcgggaagagcgggccgagtgggcaggggaggggtcctggcgggctcagcgttctgattccgaggttccctgcggtgagggcgtgttgaggcttggaatcccgacggaatctggagctccagatgtggtgggggttgtctcgcggtggcagccactcttccccaaacctggctattttcagtcatcctgctggtgcttaaaggtgttcctccgcagaccacgtgtttgtttatttaca

SEQ ID NO: 448 - DNA, 1084 bp, Homo sapiens
atcttactgctctcagcacaaagcagtgcagatgtgctgaactcaaggacctaggggcgacacctgtagagggtctggcgactgggagggagggagaggggatccagctccggcactctgccaccagccgggagctcacaggcccgtgagctccgcctgcggccttccaaacagccaagagcggagaagcggcttcggtcctacctggggaccacgaagcggcctgacctgcagggctcggcctgtgtccacaggctacccacccccacgggctcaggagttcttagatggcgccggtccatcaaaaagcgaggtccgggacagggaataacaacccacctgacagaagggaaaatcgccgccttgcatctcacttccgggttcgtctcctagcctgctcaggattggctcctgcgtgagggcggggcctcgccgctactttccccgccccctcactgcgtgcggtagccaatgagagccgaactggacttgaagcatctacgttatccatgaagtgtcgcgagagaaacggacgccgttctctcccgcggaattcaggtttacggccctgcgggttctcagaggcaagttcagaccgtgttgttttcttttcacggatcctgccctttcttcccgaaaagaagacagccttgggtcgcgattgtggggcttcgaagagtccagcagtggggtaatttaggaatcgcattcgtctcctgtttctgcaggttcccaggcggaagcccagagttaactggaacctcgggaagagcgggccgagtgggcaggggaggggtcctggcgggctcagcgttctgattccgaggttccctgcggtgagggcgtgttgaggcttggaatcccgacggaatctggagctccagatgtggtgggggttgtctcgcggtggcagccactcttccccaaacctggctattttcagtcatcctgctggtgcttaaaggtgttcctccgcagaccacgtgtttgtttatttacactcgctttaaacgcgggcccgttcccttttccaaactagccaggtcctttaaaaaaaatcgtggggtttgaataggaaatacag

SEQ ID NO: 449 - DNA, 1125 bp, Homo sapiens
tcctccgcagaccacgtgtttgtttatttacactcgctttaaacgcgggcccgttcccttttccaaactagccaggtcctttaaaaaaaatcgtggggtttgaataggaaatacaggattgcctctgttctccagagtaacctatgcgtgcaacttaaaaatatctgcacatctagagttgtttgtgtgttgaaccagaaccgtatgtgaccctttctgcccatttatttagcatacattaatttcccataagagcacgggaaaggaaaataggagtttaatcatcttggtgaaactaggaaacaggatgtacactggagatatattattttctatgctcagttcattaaaaaaaagtatagtgggtgcttagatgaaaatgagacttctaaatttgccagtctaattaagacgtctgtaccttgtgcagcgtaaatcatgttggttaaatacgtgcaggcttttaaaaaatgtgttttatgatgtaattttgtttttagaatttctagaatttggaatcgagtgcattttctgacatttgagtacagtacccaggggttcttggagaagaacctggtcccagaggagcttgactgaccataaaaatgagtactgcagatgcactgtaagcacctgacttctggaatcccttgttatttggggtttctaaagctcgtcaactgtgatcacagtaaaagaaaacttatttaataagcagtaaataaggaacctgtttatgaacagaaatattagtcatcaaaaagggtatttggaatgttttaaatatttatctgtttgttaactggaagctaatatgcagctatagattggagtcttgcagtaatttgatatattgatatagtattgtttatgttcttaggcttcatcttaaattattgaagtgataaatattcttgaattttcctgacaaattcttattagtcaatgcagttctgtttaagatttttagagtaaattcctctagtattaaataagctggaaatgaatttgaatggaatgggaataaataaaaggactgtaaaagttatgtgcactttgggaggccgaggctagcgggatcatctgaggtcaggatttggagaccagcctgaccaacatggtgaa

SEQ ID NO: 450 - DNA, 1133 bp, Homo sapiens
actttattaatgaaatctaactctgtagagagtagagtcatgcaagtgtcttcaaggccctgaatgtaaattattgcatattagtataaaattgactcataaacttagaggaaggctttttaaattaacttcgattttcctggaagagtacgaagtcagataaataacaagtttatttatctgaggaaaacaagcaaacttttgggcctgggttacatgagtttgtaaaactggttataacaaggttataaatttttgaagcagttatagaaccttgtaaagatttatgtacatttgttctgtattgaactagtggttaggaaaactgtaatgttaatgataacgttgaatacttcagattttcagatgaactctaaggctaaaaaaaatgattttactctataactgttattatttattttataagtttgtctcaatttgtttgaatatcctttaatgaattattaatatattgaaatgtttcttctttcttaatatagtgatgatgaaaacacatttaaaatattagttgcaacagatattcatcttggatttatggagaaagatgcagtcagaggaaatgatacgtttgtaacactcgatgaaattttaagacttgcccaggaaaatgaagtgagtgtggtttgtatttgtgcactatctaccatattcccttggttaacaagttatttttccttctaaagttagagatttgttttataagctcaggtgcttaccttgcctgcttgaatatcaatatactgaaagctcaaagctgattttgtatgctttgtgtcttaaattcaagtaggagctacttttgtaaatagtctgttaaaatttacaaatgtttttggggtgtttactgaatgcaggatcctgtggcagtgtctattcgaaatgtaaggtgactgtcaaagcttctgctttcagataacgtagaagaaaactggtgtgaaagacaaatatccacaatccacagatgcaaggttgtatgtgataggagccctaagaaaattctaaataacatttcctttgagtttagaggcagaaaaaatcacgtttagattatagcaagatgagtttaatgaagaaggttgtgtttaacttgggctttggaggaagggtagact

SEQ ID NO: 451 - DNA, 1161 bp, Homo sapiens
atattttattcatcattgtatcctcaggactcagtagagggtcttgcatagagtcagtatttaatgagggcagggatataatctattttgtagattgctattttttgagcttctagaacctgtaggaattctgtaaataaatgctgaatgaattaaatgaatgatttggattgaatttggtatctcttcccatacgttctgttaaagtgctaagtttatgtttgattcaaataatagaaaaaatatgatcaccttgtgtggcctgaatcagagacttggtgtaattggaagatggcttttttgaagatagcttagtcagctaaattagaaccagattaattaccagattgaaagtccctttgaataaataaaatgtaaatttttaagttgccatatataatagtgtcttttgtgagtttttttttatctctttcatctgtagtttacaaaaattttacctgtaaaacatactaattttaacacctttttctgttgatcaggtggattttattttgttaggtggtgatctttttcatgaaaataagccctcaaggaaaacattacatacctgcctcgagttattaagaaaatattgtatgggtgatcggcctgtccagtttgaaattctcagtgatcagtcagtcaactttggttttagtaagtaagtatatttatttacttgagtgagtgattacttgtgtatggtatttgctgtataagacacgtaaacacacaactgttttgccttccatataagctattttcttagtaaatatcattctttgaatttttttgtacatcattgtattaatttatattttcctaattaatagtggaactgacccagctactcgggaagctgaggtgggaggattacttgagccccagaagcagaggttgcagtgagccaaaattgtgccattgcactccagcctaggtgatagagcaagactccatctcaaaaaaaaaaaaaaaatacatggtgggactgaatatcttctcaggtttatattgtacattttggtatcctctcctgttcgtatcctctgcctattttaaaaattgagatttttttgtttgtttttctacctgaattgcagaagttacttatatattctaattagtaaacctttgtgatacatatattttttcccaatcaat

SEQ ID NO: 452 - DNA, 1088 bp, Homo sapiens
tttgaaagatgcactagaaattgctaacattatttgcctctgagaagaggagctggatggctgggggcaggggctgacaggagactttaatttgaacaggcaataagtgatagagctgggagttttaatctacctctttgggattctaaagtatatggattttcttccctccccccactacgaataaaaaccatatgctaagtttttaaaattttgaaggcttattaacttttcattaattagatatactactcatacataccacaagcactgtttattatagttggggtttctttaaaatgtagtgctttgagatattttcaaactaattgaaatgaattgtcgcctatgattttattttttaaagctctaaactagtggtcatatgccaatgtagattatgcagtttgcctatgattgcattaatattttggaggagaatcttagggaaaacagcttttgtcccgtatggaaattttaagtaactttttttttttaaggtttccatgggtgaactatcaagatggcaacctcaacatttcaattccagtgtttagtattcatggcaatcatgacgatcccacaggggtaattattgttttcttagagtttgttggaattttggaaatgatcagtttagtttgtctgtggaaagcatgccttccctttttctcattgtgtagtcaaattgagtcaaaagtcaagttgacttttcacattcatacaagcttttatactgctttttagattttttaaaaatctgaaataagaattggtgtatgagctatgcttttatttcattaatactgatgttaacaataagaagccaggagtaggagtgaacacctaacatctgtatagtggtttacagtttgtcagtgtttttataactatcttataaaatctcacttttaggaaatgattgttcaagaccatctttaaatctaaattagattatcttattacctgtttgatatggaagtaagactagagatcctacaagtattttttcattttatctggtcattaatattatgaatcactgattatctatggtcttttttccccaggctttaagacggttgctt

SEQ ID NO: 453 - DNA, 1142 bp, Homo sapiens
tataactatcttataaaatctcacttttaggaaatgattgttcaagaccatctttaaatctaaattagattatcttattacctgtttgatatggaagtaagactagagatcctacaagtattttttcattttatctggtcattaatattatgaatcactgattatctatggtcttttttccccaggctttaagacggttgcttaatattacaaagcatttatctcatggctaatttttatttttttgtggccaagacatcataagttttgatgagatattaaccttgcctttggcatgtgattccagttgctgtaggtgatttgtagtacaaaaatgtagcaaatacttttactattgtaattttgttttgagaagacactatcctcatctatgtttttgtaagtagaatatggagtatgcttttaacaggtgatacgatattcatgcagatacctacttttacatacacactaacattctttgaaattattttgcataggcagatgcactttgtgccttggacattttaagttgtgctggatttgtaaatcactttggacgttcaatgtctgtggagaagatagacattagtccggttttgcttcaaaaaggaagcacaaagattgcgctatatggtttaggtaagacagttttattttactgtttatgtccatgtgtgattctttaaacaattgagaaatttggagataagtttgtatctgtttggaaaaaatggggcaaaccttattctttattggtgactataaaaaatgatggatggttttggtaaaaatttttggtgaaaaaatgtcttttcgttactatttattattttgggttttttttagactcaggtgtagaatcctgaatgttagaattatagaataattagcaaaactgcactttgatatcttggaagtctttgaaaggtctaatgcttcactgtacaataccgctagcttataattttgtgcagctttcataatacctctggcaagtagaaaagcatcatggttatttatattttagagataaggaaaatgaaatctggatgttatatctgattctgcaagtgaaagagcaggaagtgaaatatacttttcttaaaaaagctattaacagttgttttaatcactgcagt

SEQ ID NO: 454 - DNA, 1115 bp, Homo sapiens
tactaaaagtgcaaaaattagccagacgtggtggtgcatgctgtaatcccagcaactcaggaggctgaggcacaagaatcccttgaacccaggaggtgaaggttgcagtgagctgagatcacaccactgcactccagcctgggcaatggagcaagactgtgtttagaaaagaaaagaaaagaaaaaaaaccctgaaacagctaggcatggtggcttatgcttgtaatcccagcactttgggaggctgaggcgagaggattgcttgagcccaggagtttgagaccagcctggacaacatagcaagaccctgtctcagttaaaaaaaaaagataaaaaaagaacctgcaacatacccacttataaattattccagaattcaaatatatctcccaacagtaaagtgaaatactttgagaaggacataatttagaagcaaaatagattcattttttaagccgaagtaagaaaacaatttaaaaataatgtaatgtccatttcaggatccattccagatgaaaggctctatcgaatgtttgtcaataaaaaagtaacaatgttgagaccaaaggaagatgagaactcttggtttaacttatttgtgattcatcagaacaggtaaaacttttctctgaaaaagtttgagccaagtgctgaggcttcccaaatctgtttctgagcttacctattttagtgaaatgcccttaatctttcaaggttgtcaatgcaagatcagacaaaacatagatttgctttgtgtgatttcattttgaaattgtttttagtatatattaatacctacaagaatatttgtaacataaggataaggcatacacatgaatactcctcaattcaacaaaaaggtagaatctttttgttggattatccattcctttatcccattccttttccctgatcccacctgcttccccctatcccaaagggaagcattattaattttgaattaattatttcattgcttttctttgctgtttaatcacatgtatactcatattatgctatatttacagccaacttatgttcagcattacattactgagatccattttgatgcttggatgtgtaatttatttttactgatgtgtacagttatgctt

SEQ ID NO: 455 - DNA, 1186 bp, Homo sapiens
tttatttaatatttgatattgaaaactcttagcacttatgtgagattgatgtttttactcccattatatttattagtaaaaagataatgttaagaaattactggacatatttatacttacttgcattttctgtgtgttttctctagtatatagttagactgatttatagatttctactattgatagaattcatgcttttctgattgaccaaaggggaaatccttcctatgtaaaacctttcatgatcttcctccaaatatagaattgactgctttctcttttcgggtttccacttgtctgtgtccaataagtttgtaaagctctcaaggtcaggagttagcattgatgatctttacattcccaatcctgtgcacactttctggtacatagaaggatgcaataaaatctttagtgaatggagaaagaaagatctgtatagacttcaataatatgaaatttttctaatcaccgaatttatatttttcaaaatcttgatacaggagtaaacatggaagtactaacttcattccagaacaatttttggatgacttcattgatcttgttatctggggccatgaacatgagtgtaaaatagctccaaccaaaaatgaacaacagctgttttatatctcacaacctggaagctcagtggttacttctctttccccaggagaagctgtaaagaagtgagtgttatatattttgagccaatttttaagaaatctttgctataataactaatcatctcataggtttaaggcctatgttaaggttaccgctaactggcagtattgtcatttatatgatagctttatttttgaaaattgatcattctgtgtagtcttattgtttttccagattttaagccattttcaaaaagagagcatccaattggtgttattttgctgctcattaggcaaattcaagatgcacatttttattatatttcaaggtagatgttttaggttgatgattactaatttcacaaagttcattataaaaaattatcctaaaaccatttaattgaaaattttctgattataagtgcagtataatagatctcatttttaaaacatttttgggggaatgatatgattgtaagaagtagttaacagtgattaaactcaatttttattatgggttttatcttttgaatcacttgagttctgattgttacaatgataat

SEQ ID NO: 456 - DNA, 1172 bp, Homo sapiens
attaaactcaatttttattatgggttttatcttttgaatcacttgagttctgattgttacaatgataatagggttaaagaatatggtagtagaatctatgttggttggttttttttcttcatgagtccactgcaaaatcattttgtctatatgtgtacatgtatgtacatatacataggtatatagatgtaatactatagtctacatatgctaccatcatagtcctgttaacatttttttatgcttattatgtctatcttacaagactgatcagacagggataataatggatgagttgattttactctggggaaggaaaatgtctaccatcttttcctgtgatgataacattaaggttaaattagcagaaacatttatttttaagagtatgattttataaagaagcatttttagaaactaagaaatatgaaagctttcgtttgcacatcaccctgaggaaatttacactgtgactcggtgttcatttctctccacttcagacatgttggtttgctgcgtattaaagggaggaagatgaatatgcataaaattcctcttcacacagtgcggcagtttttcatggaggatattgttctagctaatcatccagacatttttaacccagataatcctaaagtaacccaagccatacaaagcttctgtttggagaaggtaattctttttgataaagtcaatgagatctactttagttgaagaattattcaccttcaattaagtaatttaatagagtagagggaagcctttatgttgattacattctcatgaagcctgtaaggacactgttcttcagtgaatgtgtttaattgtgtccaagatttttttttttaagtcattgagagagaggaatactggatgttaaaaaaaattaaatctctctcctagtttctttcttccttttcaaaaacataatacataatcttttctcctttttaatcctgatttgatgatttgttcattttatttatgaaagcaggcagtaactttgattgaggaatgggagactatcgtgtgtgagaaaagccttagcttctaataatctgtattaggcgtccctttcaccctgaaagctaccccaaatgaaatgtgaaaaatgtgtttgctatccaccctattgctgcaatgtaagtcccaaacctccctctctatgcaca

SEQ ID NO: 457 - DNA, 1081 bp, Homo sapiens
gaactctttcaagtctaagatgttataatcttatcctctcagagtatgagacaactccacatatttgaaaacatcagtcttattttcttttaccttgaactcttccaagataaataatctaaagtccttgcttattgatccctaaatcttctggtgagtctcccatggatcatatgactgcaaaaactagacttacttggttttaagttggtaagctgaggaaagccttattgaaacatgagtagtaatattttaagttttattctaaaagaattattttagagattgaaaaattatgaagaactttcatgaaaggaaaacattaaggaatagtattaaaggagcattacaagaaggtatatttgaaaaggtgtcataaatgacctaggaaataaagatgattatgtagttcaggaaaattcctgtggtaataagctgctattcagccaagttaaactcagtttactacgttgttttttaatctttttaaaaattttgagattgaagaaatgcttgaaaatgctgaacgggaacgtctgggtaattctcaccagccagagaagcctcttgtacgactgcgagtaagtcctatttatatagattgaatattattaattttcaaagcatagtaatgtacagtttacatggtttctttgaaaagtagtgaggagagtgctcatagtaataagaagagcaatcaccatcggaggcaaaaacaaagatataaggatttgagttaatcacagtttaagtgataggtttggtaacttatttttctcattttctaaataatttgttgttatatttaatagattggctgagctctctggcttcatctttaactacctcctctactcacttcattccaggcatcttggccttctcgcagtttcttgggcatgtgggatgtgctcttatctccctttagtctgctcccgtgtcacctcactgcagccctatcatcaagattgcagcccctaccttctctccagtgccctgatttcacttaccttcttctgcttcctcttttcttcttatttttttccccgtaacacatccttctaatctatgtacggtttat

SEQ ID NO: 458 - DNA, 1127 bp, Homo sapiens
tggaggtaatcatttctcaaggctcacagatttgattctttattacctggatgttcctagcattcatctttctcttgaggcacatctctaagatgatagaccaatttactaatgcatttaaggctagtattttattttggtgtgtgtttgtttgtttgtttgttttgaaagttcagaaaattgttttcagatggtttgcttggtaggtacctagactattagtgttatcagggggagatgtaatcattctgcattgtggaaattattgcaataccttgattccatcgaacaaagtattttgcttatgcttataaacttttcaaacattagtttctcagtaggataaatgatatagctccatcatgatctactgtagaaaattaattcataaatttcaaagtatcaagcataaacactgtgaatactgaaggattagtgtgtgttttaaaaattggcaaattgttgtttcctagcgttcatagattattctgtgttttcaggtggactatagtggaggttttgaacctttcagtgttcttcgctttagccagaaatttgtggatcgggtagctaatccaaaagacattatccattttttcaggcatagagaacaaaaggaaaaaacaggtaagctagttatttttatgaggtaaaaaaatgttcttataggatttgtgaaggaatctttattaaaaactgtaacataataatggaagatgttttaatatgattgtaatgtcttaaacaaattgacagtgggaataattctcttgtcttctaaaaattagatagcaatcttttttattattattataccttaagttctagggtacatgtgcacaacgtgcaggtttgttgcatatgtatacatgtgccatgttggtgtgctgcacccattaactcgtcatttacattaggtattgctcttaatgctatccctcccccctcccccaaccccatgacaggccccggtgtgtgatgttccctgccctgtgtccaagtgttctcattgttcaattcccacctatgagtgagaatatgcggggttcggttttctgtccttgcggtagtttgctcagaatgatggtttccaccttcatccatgtccctacaaaggacatgaactc

SEQ ID NO: 459 - DNA, 1101 bp, Homo sapiens
tccagtttttgtccattcagtatgatattggttgtgggtttgtcataaatagctcttattattttgagatatgttccatcaataccgaactaccttgacgtcacaaggcaccagcagtacccatgattgcttttgcatcgtcagtgtagcaatgatggcagatggcaaaatggcaaataacatcttaggattattatgaaagtatttttgacgttattactccctgaatgggtcttgaggacctccagaagtctgtgcttcacccagtgagaacagctacaagacacctatcctggaggtatgaacgagaaatactgactgtggggaaaagaccgtggctattaacaaaaatggcttgttttgcctcaaaatttaccatgttgagcaagctggcagttgctaaagtttggccttaccttctccactgacaacttgcaatgagtatgcacattttaacattatgatagaagctattttttgatatacttctttttttctaggagaagagatcaactttgggaaacttatcacaaagccttcagaaggaacaactttaagggtagaagatcttgtaaaacagtactttcaaaccgcagagaaggtaatttcttacagttcacattttgaataatggctaccttatagtaacagattttaatttaggatatgtttagttgatagtttaaacaaaatgaatcctcaaaatgtttctatgaagtaagtagggtgacaattaattacattcatttgcagttgctgcacagcagggaaaattagtgtttaattaatgttagttattagtactgttattaatatagctgttattgttgatgttgttattctctttctttgtatctctgttgcaattattaaactgaataattttaacttaaatcagggacattcttaagtgaaacttagaagtaactagggtgacatttacattcatttgtagttgctgcacatcaaagaaaattagtgtttaattaatgttaattgtgaataccattattaacataactgttattgttgttgttattttcttactttatttgtatctctgttacaaagatctcaatccagatttagttttctcacatt

SEQ ID NO: 460 - DNA, 1174 bp, Homo sapiens
tatctctctaaccatttccccagagttatttttccttccagctcccatctgcctccctcttgtgcttttcaggacccttatgattacactgggcccacctggatagtctctgatactctccctattttacagacagctgattagcaacctttgttcctctttgccatgtattcacaggtcccagagtttaagacgtggacatctttagggggctcttattttgcctatgacactggttaatttcatctctattaatcatagctgccatttttggactccatatcctagccatcaggcctctacatttcacgtgtcctgtactcctcccccatttctggttttgactttgctttttctggttcctgatattagtaggcttaactacagctgttcactatattttttctctggtaacatatttggtaattttccttgctcatctataattattttgtaaggaataaaaactatttctgcatccagtgatttgtatcttacagaatgtgcagctctcactgctaacagaaagagggatgggtgaagcagtacaagaatttgtggacaaggaggagaaagatgccattgaggaattagtgaaataccagttggaaaaaacacagcgatttcttaaagaacgtcatattgatgccctcgaagacaaaatcgatgaggaggtaagtaactaatttgagtgtctaggtctatttaaatagtctgtctttaagagtagctctgagatttttttctggtaaatcactatttaacctctctgatttgtttagtttttctcatctataaaattgaaatgataaaatgaaggttaaattagaaaatgtagaaaatgcctagaacagagtcttgcatatggttggtactaaagtgttttgttccccatggatagtatcttctcttaaagatcctttgaaagggctttaaagtgaaccttgtaggatggtaatttttgttcattttaatttttttagtaagttttgattgagatcttgaatttcatttagaaaatttctgctaagcaagaagcagtggaaaaattacaggaaaagctgtctagacttgactacatagaaattataaatgtttgcatatcacattgtcaaaaaacaaaattaaaagatattgacatgaaaatatttgtatgtgggcagaaaaaagttta

SEQ ID NO: 461 - DNA, 1063 bp, Homo sapiens
ttgataccaggaccatgctcagcaaaccttcatgagttgactcttaataaaaatggatcttcaggggccacccacttcagatcccatttcacagagcctcctggatgtcttgcagcaaggtgcacaagagtgatttgcaatgtaataaatatttcaagccttgtcaaggagatatttttgtttttaactagtttactgaagtgtaatacccatagggtattagaatttttcctgtacagtctgaaagactttttcagtgatgtgaaacattttggcagcaggtaatataattttgcttcgggtcaatatgagtttttttttttaagagtacattgtgcaattttaacgttaataattggaaaaatatgatttacttttgtgagacattgttaaatttgcaagttttataacataaagcatttcttaattgtagccccttgttttatatttacataactggaataggcaacatgtttgtgatttactctgttatgatctaggtacgtcgtttcagagaaaccagacaaaaaaatactaatgaagaagatgatgaagtccgtgaggtaattattctgctgcaaattcttgtgtttatatatcactttcttaaactagaataaccagtaggtttagttagaatagtcagtccataggtctaggggataggagtgagctggggttggcttaggatggctgcttttggttgatttcagttcagcctacaaatattctgctcattgctctttttttccattttgttcttgtctaaaacctgtttagcaagtgcagtgactcacacctgtagtcttggctacttgagaggctaaggttggaggggattgcgtgagcccaggagttcaaggctgcagtgaactatggctgcaccaccacactctagcctgggcaacagagtgagaccctgtctctaaaataaataaataaaaataaataaaacccatttaattgtatgtgtgtggggatatatacaacaaaagcccctattactcaaaataatatctctttgttagcagagcatcttatagataaaatcttatcttactga

SEQ ID NO: 462 - DNA, 1220 bp, Homo sapiens
agtatggtagattggtctgacagataataagtattaaatttgattggtggggaggttctcctttacacatatataaatattttttgtttttatttttatttttgagacagggtctctctttgtcacccaggctggagtgcagtggtgtgatcatagctcactgcagcctgtatctcctaggctcaagtgatcctcctgcctcagcctcctgtgtagctcgggactacaggtgcatgccaccatgcctaattttttttttttttttttttttttgtagagacggggtttcgctgtgttgcccaggcttgtctcaaactcttgggtgcaagtgatcctcccgcctcggcctcccaaagtgctgagattacaggcgtgagccactgtgtcagcctcctttatgtttttatagtatgattagttcatgtcaatgcctaaattaatgatttttaggatggtacgttatctcattgtgtgtactttctccttcttctccctcttaggctatgaccagggccagagcactcagatctcagtcagaggagtctgcttctgcctttagtgctgatgaccttatgagtatagatttagcagaacagatggctaatgactctgatgatagcatctcagcagcaaccaacaaaggaagaggccgaggaagaggtcgaagaggtggaagagggcagaattcagcatcgagaggagggtctcaaagaggaagaggtgagcactgagttcagtcctgtgcacattcacacttggcagttgagtggaaaatacagaattagatcttgtcagagttgaattataagttttatttctaaaacacggttctttaaaaatctatttttataatatataaagacagtctttaaggcagttctgacatgtgccttttacttaaataaattttgaatggccacatgcacttagggttttaattgttcttagcacataccttataaaagcttcactgtgtttgtcacgtagtaccttttggatacatttaatgtcatatgtattttcacatgtgcaaagtaataggcaaatatgagttgttaaagaaaatagctaaaagcctttggcaacaggaggaaaactccagatcatacaattattatttttgttactgtcataagatacaaatacacatatgcttatcaagtagtctttataaagtcagtttaagaaagaaaactgccccccaatttgattcctaaaac

SEQ ID NO: 463 - DNA, 1084 bp, Homo sapiens
gctctgttgcccaggctggagtgcaatggtgcgatttcagctcactgcaacttccgcctcccaggttcaagcaattctcctgcctcagcctcccaggtagctgggattacaggggcccatcatcatgccagttaatttttgtatttttagtagaggtggggtttcaccatgttggccaggctagtcttgaactcttgacctcaagtgatcctcccgcctctgtctcccaaagtgctgggattacaggcgtgagctaccacgtccagcctatttccttacattttaattggataaattaaattggataaactgaagtgtggcctaaaagaatagtctctgaaaattggtcagactctagatgtttgttcttatatatatgtctggctttttacagacaaactatttgacataagtttatttagctttcattttttagtgttgtatgaaataaaccttagctgctgataggcttgtacattgactgttcatttttctaacagcagacactggtctggagacttctacccgtagcaggaactcaaagactgctgtgtcagcatctagaaatatgtctattatagatggtgagtatagactgcaagtgattatttataaattccaacattagaaagaccaaggtaatcaccattggtagcccttatttgtgttgcaatcattgggaagttataagggcaattaggatcacaggataaattattttttaaaagatctttgctatgcattagagttactgaagagggtaagcttttaaaatcatgttttataggccaggcacagtggatcacacctgtaatcccagcactttgggaggccgagacaggcagatcacgaggtcaggagatcgagaccagcctggccaacatggtgaaacccggtctctactaaaaatacaaaaatcagccaggcgtggtggcacatgcctgtagtcccagctacttgggaggctgaggcaggagaatcacttgaacccaggaactggaggttgcagtgagccaagatcatgccattggactctaccctagcaacagagagagactccgtctcaaaaacaaaacaaaacaaa

SEQ ID NO: 464 - DNA, 1059 bp, Homo sapiens
aatttttatcatagaatgctgttttctagaattctcctctggaatatttcttagatattgaatatggctactaaggtagaggaaaatgagaaactactggaaccccatggctcctaatgtagcaacagggataaaggtatcgtcaacaacaaagaagggattaggaggctttccttcaatacatttgtagttcatttggttaggtgattagattttatccttcaggtgtttttctatgaaatatttttagtgtgtgtatttataaacactacagtatctcaataagctgggaaataatgagactgacagttgggcattgagttatgcgtacctataattctatctccctttagatttttaaaaatatcaaatagttttataattaggcatcattcagttttgcagataggactcagaaaatctttagctaaagaagtatgcaagtttttctaagttattttaagaataacataatgcacatttcatctttttcattctagcctttaaatctacaagacagcagccttcccgaaatgtcactactaagaattattcagaggtaagaaaaaaagttttatggttgtgtattaataatttatgttttctgcattatgaattgtcaactctctgatttacaaagtaaataaaagaagaaaaattatggaacattaaagctggaaggagctttaccaattatctctagggcttctaggatttgattttttttttcttggttgctctctttttttaaataatggttattatagaaatccataaatgttatgtatacagtaatgttttcaaggataacagtgttgaaccaaaagagctcatacatggaatactaatattgaaggtgagttcaatggttatagaggttttttctatgctggatttccttttgttacttatcttcccaaaatactagctgtgccttaacagctgttgctagacttaagatgaatgaaaaggctggagtccagcgatccatgtggtttgccctaggtttagcctgggccttctgctcttcctttcgattccaagaagagtccaatatgg

SEQ ID NO: 465 - DNA, 1068 bp, Homo sapiens
aaaatgtagagaaatagtattttgggtggtagaatcaacagtcagaaatatctttattgggtcttaacactaacaaatggtatttaagagggacagatttaacagaaagatatctagtatttcccacatggtctgatacctcatttaaagttggagatggaacactgatggtctcacctctcataagaaactaagaggaaagtcataaggtctgcatatgagcctatgcaagtcattcaccagtgtaactgtgttcccttaggtgctcaggctcctgggatggccaggagagaggtgagcaaaaagtaacatttgtgaatgaagagggacattggagggaggtcagactgagtgttagttttaatggttatggctttctgtctccttttttgtggctcatatataacttaagatttaatcgtgtaattcatttcttcattttcatttttattcagagtctattctcacaaaaactgtttgttgctttgtttccttgccaggtgattgaggtagatgaatcagatgtggaagaagacatttttcctaccacttcaaagacagatcaaaggtaggtgcagtgattttctgcaaaagaaacatctgaaaaaaattaaaaattatccagaattccaaagttacacatttttctatgccatgtaagtttaacagacttattttcaactagtaaagtatgtagaggaatgaaaacagaccaagggctagtttatagagttgatgcagcattagtacaaggattttcagtgaaaattgaaatagcctgtaatttttttccttttgactttattagtgcttttctttctttttatttatttatttattttttgagacagtgcctcattctgtcgcctagactggagtgcagtagtgcgatcttggctcactgcaacctccactttctgggctcaagcaattctcccacctcagcctcctgaatagttgggattacagacgtgcaccaccacacgtggctaattttttgtatttttggtagacacagggttttgccatgttgcccaagctggtcttgaactcctgagctcaggcgat

SEQ ID NO: 466 - DNA, 1076 bp, Homo sapiens
agagtaaaaagagtaggaattatgattttcttattaactgagatttgaatagaaaatatttcaatgttcccatggttttcagaagtggaagatggtaatgtatacattttggtacatgataagtactataataatataagtaagtattgttgtagtacttaatatgtgtcaggcactgttctaagtgtttaagcatattaacacatttagtctttataaaaccattatccccgttttacagatgaggaaattgaagcacagagaggttaagtaacttgctcaaagccacataggtagtaaagggcaaaaccagagttcaaacctcggccccagagtccttttccttacagttaagttttattgccgctaatgtagattttaagggaattgtgtgttatttatattcgtggcagctgctggattgaaaaacttagccagaaaggcacacttgatgaattatgtagttcattgtgtttgtttttgtttttgttttgcctcaggtggtccagcacatcatccagcaaaatcatgtcccagagtcaagtatcgaaaggggttgattttgaatcaagtgaggtaaataagtaatattgttaaattttaattaatttttaactttataaaatttaaatagagactgccagctagttgctgaacttttttttctttgataaataacttcatcttttatgttcagggagtacatgtgcaggtttgttacatgggaattgcgtgatgctgaggtttggtacagatcccatcacccaggtagtgagcagtaggcagttttccaacacacatcctactctcagcctccactctctagtagtccacagtgtctgttgttcccatcttcatgtccatgtgaactcagtgtttagctcccacttgtaagtgaggacatgtggtatttggttttctgttcctgttaatttgcttaggatagtggcctccagctgcaaaggacataattttgttctttttatggctgcatagtgttccatgttacatatgtaccaccattttctttatccaatccgtattgatgggcacttaagttgattccatgtctttgc

SEQ ID NO: 467 - DNA, 3879 bp, Homo sapiens
ttgctaggttgttttttgcataagtgtgagagtagctagctatttctagtattaaatggtaatgggaaataaaattacagctgtttctgagttggatctccatgtggcttcattattttttcgctgtgaatttccagaagagtagatacaactgtaataaaatgtaaatgagaaaatatattcaaaaaccaaatataaaatgacttgaattatttttctggcttacctatacttcatttatctttattaaggttagtaagggaaatgtgtgtggtttatattgtagatacatgcacacacagcaggataaattttcattttaatgctcattaagaatttaattgtacttaatatattttgcagttataaaggaaatagaaaaataaagtctatcccatgtgaaatgactctcactggtattgttttgcccataagaacttctgtcttgtttcagtgaagcagggaacaatcactaatacaacatttgtatctcatttcaggatgatgatgatgatccttttatgaacactagttctttaagaagaaatagaagataatatatttaatggcactgagaaacatgcaagatacaggaaaaatgaaaatgttacaagctaagagtttacagtttaagattttaagtattgtttcctgagcataactccataagtaagaaatttctagttcacagacatacaatagcattgattcaccttgtttttttaacctggttgttgtagtaagagctttgtttcaatatcactcttgagtaaagattaaaataaagctaccattttacatttctatttcataatgaaaaactatgtcagtattttaatatggttacatttagccaaagttgagggaaagagcttataaaatttaacttcttcataattttagtaatttcctagaggttctgggttttctgaaagtaaaacaatttatgcgaacctatgtctaaattcactgtttgttactatgtatgtttttttccaatgcttcttataagactaaatgattagaagtacctaatagtttgaacagatatgtttttatttaaaagagtagaataacctttcagaattactgagttttttattccagttgtagcaaagatttcaaaagattgtgttcccattaagtggtagtaatttcctttattattctgtatccttaatggtgttctctctctctctctctctctctctctctccctctcccccccgttccccactcttcctttctcctttgctttttcttctctttcatacatatatgcgtgcctagttctaggaggaaacgggttaaaaattgttttaaactacatcttgaaaatattgaagaatttgttttaggtagagtggtcagttgaaccttacagtaaagtatagaaatatatttaatgtggaatgtcaatgccaggatttctcattaacaatattttatctcaactttggttcctgtgatacatttctgaatgggcaattccagaaatcttagtagcccatgttaagcttctattttttacttgttttcggggagaaataagaattagacatcttcagatttaagttaaataatcccattctttataatcctctgtaaaaagatccctgagattattccttcttctagttttatgcgacagctttactttaaaattcaagttatacatcttgggagtacaatggcccgacatttcttcataggtagaaacaaatacttgactcagtgatactcatgaccattagaatagtcatacctggaatgtgtcaaattataagagacagacacttggttagtggctgcctcatatagcacttttgaagaggcctaagtcaaaacttgcaatataacattctattgactttcttaaaaatattttttctgtacctaacttgagcataagggttatttgagcaagtaacattaactcagtggaaggcattgtcctgtgaaatattcttaggcagatctgcccacatctttattgaacttgaaatctaatatttctagtatttgaacaaagcagaaggttaagtcagggaagagcagtgctgtccatgatgtaatggaagctaccaggggaggcagtgtctggatgatgctgtgctacctacccctgcacaagccatgctggctcagtctgagctgtgggccacatcagctagtggctcttctcatgcatcagttaggtgggtctgggtgagagttatagtgagggaatggtcactaaagtatcctgacaagttcctaggaaaaaaggaataaagtttttttccttaaaaaaaaaaaaattgctcttggctgtgaaaagaggtactaaatgcgattcagttcaccgctaaggaaagtgatgacatagcagttacagagggtgataaatctctccagctaattcaggtcattttgtgaatactatgtatcaagccctgaaaatatggtaaataaaacgtgacagggaaacctttttttgattgaatattgttacatagttaaatgtgctatatatccttaatattttatattgatcctgcaaaatctgttggttttaggggagttttgttttttgtttctaacaattttcagacctgttggtataggaatgtagaagtctttcagatgatttgaaagcagctgcatttgctcttggaggctttgggagagcaggaatgaaaacattcagaggaagacatctgtagggaattcttctgttacttaccaaagaataagtgtctttctggtgttttatttcctatcataaaaatacaacagtgcatttacaaggttaaagattcctcgaagttctaggaaattcttgaaaatataagtggtgcttagaaaattcaagcatttaggaatgtgacctttaattcaggtatgtaaaagacttttttcccaaacttttaaaagtaggaaatacaataaatacagaaaagtcatatggttgaataaataattataaattgagcactgatggaatccctctacaggtcaagaaatagcgcagtgtcctggatgcccattatattgttttctcctttctgggtaacaagccctaacttctgtaatttaaaagctcctacttttgccacaaggtggtgcttctgccattagacgcagttaggaggatgcaactgcaaatctaaaattacgaagttagtgtagttgcaataaacttagaacatatgcattaatactaaacctatgcagtaataccataattagccttctaatcatgtaatttgctttacttaggtatttcatttggttcagcctgttatggaatttaccagcttgataaatttgcctataaagttttataaagaaaaggaatattttgttttcataaagaggaaaatccattcttagaaaaaaactgagtaaaaaagtatctcaatgggctgggtgcagtggctcatgcctttaatcccagcactttgggaggccgaggagggggttcacctgaggtcaggagtttgagaccagcctggccaacatggtgaaacctcgtctctactaaaaatacaaaagattagctgggcatggtggtgtgtgcctgtaatcttagctactcaggaggctgaggcaggagaatcgcttgaacccaggaggcagaggttgcagtgagccgagattgtgccattgcactgcagcctgggcaacaagagtgaaactcaatctcaaaaaaaaaaaaagtatctaaatgtaaaatatcttttttggaaatatagaatttaaaagcgactttcccccaaagaaatctgatgtcctttttgtatctgtcataaatttaattcatagtattttgggttttttttgttttttttttttgagacggagtctcgcactcttgcccaggctggagggcagggg

SEQ ID NO: 468 - DNA, 1500 bp, Homo sapiens
aggtatgtaaaagacttttttcccaaacttttaaaagtaggaaatacaataaatacagaaaagtcatatggttgaataaataattataaattgagcactgatggaatccctctacaggtcaagaaatagcgcagtgtcctggatgcccattatattgttttctcctttctgggtaacaagccctaacttctgtaatttaaaagctcctacttttgccacaaggtggtgcttctgccattagacgcagttaggaggatgcaactgcaaatctaaaattacgaagttagtgtagttgcaataaacttagaacatatgcattaatactaaacctatgcagtaataccataattagccttctaatcatgtaatttgctttacttaggtatttcatttggttcagcctgttatggaatttaccagcttgataaatttgcctataaagttttataaagaaaaggaatattttgttttcataaagaggaaaatccattcttagaaaaaaactgagtaaaaaagtatctcaatgggctgggtgcagtggctcatgcctttaatcccagcactttgggaggccgaggagggggttcacctgaggtcaggagtttgagaccagcctggccaacatggtgaaacctcgtctctactaaaaatacaaaagattagctgggcatggtggtgtgtgcctgtaatcttagctactcaggaggctgaggcaggagaatcgcttgaacccaggaggcagaggttgcagtgagccgagattgtgccattgcactgcagcctgggcaacaagagtgaaactcaatctcaaaaaaaaaaaaagtatctaaatgtaaaatatcttttttggaaatatagaatttaaaagcgactttcccccaaagaaatctgatgtcctttttgtatctgtcataaatttaattcatagtattttgggttttttttgttttttttttttgagacggagtctcgcactcttgcccaggctggagggcaggggcaccatttcggctcactgcaagctccacgccattctcctgcctcagcctcccaagtagctgggactacaggcgcccaccaccacgcctggctaatttttttttttttttttttgtatttttagtagagacagggtttttctgtgttagccaggatggtctcgatctcctgaccttgtgatccacccacctcagcctcccaaagtgctgggattacaggcctgagccaccacgcccagcctattttgtgtttttttaaagctaactaccattaagatcattatagaagtttggtataatgaagatttgggtttttcagtccaatgagtttccatattcttgaatgaaaaagatccacatttcatcatttgcctgtttcattttcttttagtacttttgaacttagtttggtcagaaaatactagaattttagtttgatctaaagaaccagcttatataacttgctgttgccatgtacatttgtatgtctttgctgtgtcaa

SEQ ID NO: 469 - DNA, 3145 bp, Homo sapiens
ggcgggaaacagcttagtgggtgtggggtcgcgcattttcttcaaccaggaggtgaggaggtttcgacatggcggtgcagccgaaggagacgctgcagttggagagcgcggccgaggtcggcttcgtgcgcttctttcagggcatgccggagaagccgaccaccacagtgcgccttttcgaccggggcgacttctatacggcgcacggcgaggacgcgctgctggccgcccgggaggtgttcaagacccagggggtgatcaagtacatggggccggcaggagcaaagaatctgcagagtgttgtgcttagtaaaatgaattttgaatcttttgtaaaagatcttcttctggttcgtcagtatagagttgaagtttataagaatagagctggaaataaggcatccaaggagaatgattggtatttggcatataaggcttctcctggcaatctctctcagtttgaagacattctctttggtaacaatgatatgtcagcttccattggtgttgtgggtgttaaaatgtccgcagttgatggccagagacaggttggagttgggtatgtggattccatacagaggaaactaggactgtgtgaattccctgataatgatcagttctccaatcttgaggctctcctcatccagattggaccaaaggaatgtgttttacccggaggagagactgctggagacatggggaaactgagacagataattcaaagaggaggaattctgatcacagaaagaaaaaaagctgacttttccacaaaagacatttatcaggacctcaaccggttgttgaaaggcaaaaagggagagcagatgaatagtgctgtattgccagaaatggagaatcaggttgcagtttcatcactgtctgcggtaatcaagtttttagaactcttatcagatgattccaactttggacagtttgaactgactacttttgacttcagccagtatatgaaattggatattgcagcagtcagagcccttaacctttttcagggttctgttgaagataccactggctctcagtctctggctgccttgctgaataagtgtaaaacccctcaaggacaaagacttgttaaccagtggattaagcagcctctcatggataagaacagaatagaggagagattgaatttagtggaagcttttgtagaagatgcagaattgaggcagactttacaagaagatttacttcgtcgattcccagatcttaaccgacttgccaagaagtttcaaagacaagcagcaaacttacaagattgttaccgactctatcagggtataaatcaactacctaatgttatacaggctctggaaaaacatgaaggaaaacaccagaaattattgttggcagtttttgtgactcctcttactgatcttcgttctgacttctccaagtttcaggaaatgatagaaacaactttagatatggatcaggtggaaaaccatgaattccttgtaaaaccttcatttgatcctaatctcagtgaattaagagaaataatgaatgacttggaaaagaagatgcagtcaacattaataagtgcagccagagatcttggcttggaccctggcaaacagattaaactggattccagtgcacagtttggatattactttcgtgtaacctgtaaggaagaaaaagtccttcgtaacaataaaaactttagtactgtagatatccagaagaatggtgttaaatttaccaacagcaaattgacttctttaaatgaagagtataccaaaaataaaacagaatatgaagaagcccaggatgccattgttaaagaaattgtcaatatttcttcaggctatgtagaaccaatgcagacactcaatgatgtgttagctcagctagatgctgttgtcagctttgctcacgtgtcaaatggagcacctgttccatatgtacgaccagccattttggagaaaggacaaggaagaattatattaaaagcatccaggcatgcttgtgttgaagttcaagatgaaattgcatttattcctaatgacgtatactttgaaaaagataaacagatgttccacatcattactggccccaatatgggaggtaaatcaacatatattcgacaaactggggtgatagtactcatggcccaaattgggtgttttgtgccatgtgagtcagcagaagtgtccattgtggactgcatcttagcccgagtaggggctggtgacagtcaattgaaaggagtctccacgttcatggctgaaatgttggaaactgcttctatcctcaggtctgcaaccaaagattcattaataatcatagatgaattgggaagaggaacttctacctacgatggatttgggttagcatgggctatatcagaatacattgcaacaaagattggtgctttttgcatgtttgcaacccattttcatgaacttactgccttggccaatcagataccaactgttaataatctacatgtcacagcactcaccactgaagagaccttaactatgctttatcaggtgaagaaaggtgtctgtgatcaaagttttgggattcatgttgcagagcttgctaatttccctaagcatgtaatagagtgtgctaaacagaaagccctggaacttgaggagtttcagtatattggagaatcgcaaggatatgatatcatggaaccagcagcaaagaagtgctatctggaaagagagcaaggtgaaaaaattattcaggagttcctgtccaaggtgaaacaaatgccctttactgaaatgtcagaagaaaacatcacaataaagttaaaacagctaaaagctgaagtaatagcaaagaataatagctttgtaaatgaaatcatttcacgaataaaagttactacgtgaaaaatcccagtaatggaatgaaggtaatattgataagctattgtctgtaatagttttatattgttttatattaaccctttttccatagtgttaactgtcagtgcccatgggctatcaacttaataagatatttagtaatattttactttgaggacattttcaaagatttttattttgaaaaatgagagctgtaactgaggactgtttgcaattgacataggcaataataagtgatgtgctgaattttataaataaaatcatgtagtttgtgg

SEQ ID NO: 470 - DNA, 1500 bp, Homo sapiens
gtcaaacgtttgtctttttatttattttattttgtattttttgagacagggttttcaatctgtcgcccacgctggagtgcagtggcacaatttacggctcaccgcagcctcgacctcccgggctcaggtgatcctttcgcctcagccctgctaatatctgggatcacagacgtgggttttaccatgttgcccaggatggtgtcaatctcctgggctcaagtgatccgcccacctcggcctcccaaattgctgggattacaggcgtgagctaccgcgccctgccacaaacgcatatcttctaacgtaccatttcatttacttgctatattcattatctgaattttctcatattagaatgtaagcagaataaaggcagtgatttttctttttactggcgatcctcagagccaagaagagtctgggacatagcaggccatataaatgttttcgaatgagtgaatcatcaacgagtggatgaaacgataatgtggctaacaggcagcagtaaggaggctgtgtagaataaacccgtaatcccgatgttggcagtttgcttagaaagaaaaagggaggcagtcggagaggggcacacgttttaacaaaatactgggaggaggaggaaggctagttttttttttgttttcaagtttccttctgatgttactcccatgcttccgggcacattacgagctcagtgcctgccggaaatctcccacctggtggcaacctacccttgcatacaccccacccaggggcttcaagccttgcagctgagtaaacacagaaaggagctctactaaggatgcgcgtctgcgggtttccgcgcgacctaggcgcaggcatgcgcagtagctaaagtcaccagcgtgcgcgggaagctgggccgcgtctgcttatgattggttgccgcggcagactcccacccaccgaaacgcagccctggaagctgattgggtgtggtcgccgtggccggacgccgctcgggggacgtgggaggggaggcgggaaacagcttagtgggtgtggggtcgcgcattttcttcaaccaggaggtgaggaggtttcgacatggcggtgcagccgaaggagacgctgcagttggagagcgcggccgaggtcggcttcgtgcgcttctttcagggcatgccggagaagccgaccaccacagtgcgccttttcgaccggggcgacttctatacggcgcacggcgaggacgcgctgctggccgcccgggaggtgttcaagacccagggggtgatcaagtacatggggccggcaggtgagggccgggacggcgcgtgctggggagggacccggggccttgtggcgcggctcctttcccgcctcagagagtgggcggtgagcagcctctccagtgcggaggcacgggggcggaacgttggtgcttgtgcggattccgccgtccccaggttctgcttggctccggagggacgcccccctcagccctgaaacccgtgcctctccagccgccccggatct

SEQ ID NO: 471 - DNA, 1279 bp, Homo sapiens
agcagtaaggaggctgtgtagaataaacccgtaatcccgatgttggcagtttgcttagaaagaaaaagggaggcagtcggagaggggcacacgttttaacaaaatactgggaggaggaggaaggctagttttttttttgttttcaagtttccttctgatgttactcccatgcttccgggcacattacgagctcagtgcctgccggaaatctcccacctggtggcaacctacccttgcatacaccccacccaggggcttcaagccttgcagctgagtaaacacagaaaggagctctactaaggatgcgcgtctgcgggtttccgcgcgacctaggcgcaggcatgcgcagtagctaaagtcaccagcgtgcgcgggaagctgggccgcgtctgcttatgattggttgccgcggcagactcccacccaccgaaacgcagccctggaagctgattgggtgtggtcgccgtggccggacgccgctcgggggacgtgggaggggaggcgggaaacagcttagtgggtgtggggtcgcgcattttcttcaaccaggaggtgaggaggtttcgacatggcggtgcagccgaaggagacgctgcagttggagagcgcggccgaggtcggcttcgtgcgcttctttcagggcatgccggagaagccgaccaccacagtgcgccttttcgaccggggcgacttctatacggcgcacggcgaggacgcgctgctggccgcccgggaggtgttcaagacccagggggtgatcaagtacatggggccggcaggtgagggccgggacggcgcgtgctggggagggacccggggccttgtggcgcggctcctttcccgcctcagagagtgggcggtgagcagcctctccagtgcggaggcacgggggcggaacgttggtgcttgtgcggattccgccgtccccaggttctgcttggctccggagggacgcccccctcagccctgaaacccgtgcctctccagccgccccggatctgaacttgtgatcacggagtgtttacgtcgtgccaggcattttaatgcattgttctagttcattttccagcagtcgcattcctcgccttggccctacatgtagcgctcattacaaacacggccagaatctcttattaacaaacagcagccaggagtgagatttaaaatagactgggggtttaggagacccttttatgacacgtaattctgctcccacgacgctcccatttataccgccggtccagctaagggtctggtaatggagcgccgttgaagagca

SEQ ID NO: 472 - DNA, 1155 bp, Homo sapiens
tttgaattaatgctgaaatgagttaaggctttgggggactgttgggaatgcatgattggttttgaaatgtgaggacatgagatttgggaggggtcatggcagaatgatatggtttggctatgtccccacctaaatcccatcttgaattcccatgtattgtgggagggacctggtgggagatagttgaatcatggggatggatctttcccatgctgttgtgatagtgaataagcctcatgagatctgatggttttaaaaacggaagtctacctgcacaagctctttctttgcctgctgccatccatgtaagacatgacttgttcctccttgccttctgccatgattgtgagacctccccagccatgtggaactataagtccagtaagcctctttttcttcccagtctcgggtatgtctttatcagcagcatgaagtccagctaatacagtgcttgaacatgtaatatctcaaatctgtaatgtactttttttttttttaaggagcaaagaatctgcagagtgttgtgcttagtaaaatgaattttgaatcttttgtaaaagatcttcttctggttcgtcagtatagagttgaagtttataagaatagagctggaaataaggcatccaaggagaatgattggtatttggcatataaggtaattatcttcctttttaatttacttatttttttaagagtagaaaaataaaaatgtgaagaatttaattgtgttttagtattttaagtagattgtgatagtagaatggtttgagacactttaatagcaattagcatgtggtttttaaaaagttgcagtttggctggtcgcagtggctcatgcttgtaatcccagtattttgggaggctgaggcaggtaggttgcctgagcccaggagttcaagaccagcctgcccaacgtggtaaagccccatctctactgaagataaaaaaatttaaaaaaattagctggggctattggcacacacctgtggtcccagctaatcaagaggatgaggttagaggatcacttgagcccaggaggttgaggttacagtttaactttcagaggccaaggcaggaggattgcttgagtccaggagtttgagaccaccctggggaatgtagggagatcccatctctatagagggatagattaga

SEQ ID NO: 473 - DNA, 1279 bp, Homo sapiens
cctcgtgatccgcctgccttggcctcccaaagtgttgggattacaggcgtgagccacagcactcagccagttatttttttataagaaaacattttactggccaggcctggtggctcacacctgtaatcccagcactttgggaggccgaggcaggcggatcacgaggtcaggagttcgagaccagcctggccaacatggtgaaaccccatctctactaaaaatacaaaaattagccaggcgtggtggtgtgcgcctgtattcccagctactggggaggctgaagcaggagaatcgattgaacccttgaggcagaggttgcagtgagttgagatcgcaccattgcactctagcctgggtgacagagcaagacttcatctcaaaaaaaagagaaaacattttattaataaggttcatagagtttggatttttcctttttgcttataaaattttaaagtatgttcaagagtttgttaaatttttaaaattttatttttacttaggcttctcctggcaatctctctcagtttgaagacattctctttggtaacaatgatatgtcagcttccattggtgttgtgggtgttaaaatgtccgcagttgatggccagagacaggttggagttgggtatgtggattccatacagaggaaactaggactgtgtgaattccctgataatgatcagttctccaatcttgaggctctcctcatccagattggaccaaaggaatgtgttttacccggaggagagactgctggagacatggggaaactgagacaggtaagcaaattgagtctagtgatagaggagattccaggcctaggaaaggctctttaattgacatgatactgtttcatttaaggaaaaataataaaaaaactcttttttttgtatctaattaaaataatgttctgatgtttacagaaactttgtatatttaattggacattagaacaagctgtttgttgtgtaagatttattttacctcagatcttttctcccccctttcctttctgtcttgtgttccaaaagagtaattattacggtaaatattactgtaattatggatttatcaaataagatgcagttctttagcattttttgataaatcgagtggaactttagcctgttattttactatttgttttattttaactaaattctgattgtgtcattttttttttttttttttgggaccgagtctcgctctgtcgcccaggctggagtgcagtggtgcgatctcggctcactgcaacctctgcctcccaggttcaagcaat

SEQ ID NO: 474 - DNA, 1147 bp, Homo sapiens
aagctgaggcggccggatcacctgaggtcagggattcgagaccagcctgtccaatgtgctgaaaccctgtctctactaaaaatgcaaagaaaaaaaaaatctagccaagcatggtggcttgctcctgtaatcctagctacttgggaggctgaggcaggagaattgcttgaacctgggaggcagaggtagcagtgagccaagatcgtgtcaccgcattccatcctgggcgacagtgagactctgtctcaaaacaaaaaaagagttgttaccgttgggactattttttgaaagctttatgtgaacgtaattttatattttgatgaaaatttagtttattgatgtaaaaagtgtatcagtacatcatatcagtgtcttgcacattgtataaacatttaatgtaggtgaatctgttatcactatagttatcaatgttataattttcatttttgcttttcttattccttttctcatagtagtttaaactatttctttcaaaatagataattcaaagaggaggaattctgatcacagaaagaaaaaaagctgacttttccacaaaagacatttatcaggacctcaaccggttgttgaaaggcaaaaagggagagcagatgaatagtgctgtattgccagaaatggagaatcaggtacatggattataaatgtgaattacaatatatataatgtaaatatgtaatatataataaataatatgtaaactatagtgactttttagaaggatatttctgtcatatttatctcaaaacctaaactgtgtatcaatgatattaagcttttttttttttttgagacagagtttcacttttgttgcccaggctggagtacaatggcgcgatcttggctcaccacatcctctgcctcccaggttcaagtgatcctcctgccttggcctcctgagtagctgggattacaggcatgtgccaccacgcctggctcatcttttttgtatttttagtagagatggggtttctctatgttggtcaggctggtctcaaactcctgaacctcaggtgatccgcccgcctcgggcttccaaagcgctgagattgcaggcatgagccactgtgtctggcctatttttatagtttatgtacttggaattatataatatattctgcctagcttc

SEQ ID NO: 475 - DNA, 1150 bp, Homo sapiens
gttcagaattaaggcactggctgatctgttgtctggtgagggcccacttgttcatagataaccattttctcactctaacctcacaaggttgaaagggcctaatttttgtgtttttagtagagacggggtttcactatgttggctaggctggtctcaaactcctagcctcgagtcatccacccgcctcgtcctcccggagtgcttggattacagcatgagccactgcgcccggcccccattttagttttgatggacatttgggtaattttcttttttggctattctaaataatgctgcaattactgttaattttcaccttgtaaaaaccattttcaaatctcaagagattaacctttagttttcttggtttggattgggaaggaacaccaaggaaaatgagggacttcagaatttattttcattttgcatttgttttttaaaatctttagaactggatccagtggtatagaaatcttcgatttttaaattcttaattttaggttgcagtttcatcactgtctgcggtaatcaagtttttagaactcttatcagatgattccaactttggacagtttgaactgactacttttgacttcagccagtatatgaaattggatattgcagcagtcagagcccttaacctttttcaggtaaaaaaaaaaaaaaaaaaaaaaaaaaagggttaaaaatgttgaatggttaaaaaatgttttcattgacatatactgaagaagcttataaaggagctaaaatattttgaaatattattatacttggattagataactagctttaaatggctgtatttttctctcccctcctccactccactttttaacttttttttttttaagtcagagtctcacttgttccctaggccagagtgcagtggcacaatctcagcccactctaacctccacctcccaagtagttgggattacagttgcctgccaccatgcctggttaatttttatatttttagtagggttgcggggacagggtttcaccatgttggccaggttggtctcaaacttctgaccttaggtgatcctcccacctcggcttcccaaagtgctgggattacaggcttgagccatcgtgcccagcctactttttacttttttagagactgggcttggtggagtgaagt

SEQ ID NO: 476 - DNA, 1134 bp, Homo sapiens
cgtggctcatgcctgtaatcccaacgctttgggagtccagggtgggaggatgacttgaggccaggagttgagaccagcctgggcaacatagtgagactctgtctctacaaaagaaaaaattagcggggcttagtggcgtgcgcctgtagtctcagctactcgaaaggctgaagtgggaggattctttgagccccaagggttctggcttgccgtgagccaggatggcaccactgcactccagtctgggcaatagagtcagaccctgtctcaacaaataaaataaaactgtagtaattataaagtggttttggctgggggagaaatgtacagttgaacatacggattaagaggttgaaagttggtcttaggaagaggaactttttgtggaaatttcttaatatttgaagaatattatgttattgttcctctgtttttcatggcgtagtaaggttttcactaatgagcttgccattctttctattttattttttgtttactagggttctgttgaagataccactggctctcagtctctggctgccttgctgaataagtgtaaaacccctcaaggacaaagacttgttaaccagtggattaagcagcctctcatggataagaacagaatagaggagaggtatgttattagtttatactttcgttagttttatgtaacctgcagttacccacatgattataccacttattgtaatatgcagttttggaagtatatgttaccatttaactgtacagagtacatagtaatagagtggtaattatttagattgattaaagaactcatttttttaaataagttttttttttttcactataaaagtttattttatttgagatggtatggtatcgaacatgttcatattgtgtgtaatcgtgggtaaattactcaacctttatgtcatagtttcttcacctttaaaatgacattaataaaagagctacttaataggattataagcatgagatgatttaatatacataaaatacttacagtctgatatataggaagcacttaactctttatcctagaaaagatttaaggtgaccttaacatatatgtcagaaaatctttaaaattgtggaaataaaaggttgtataattctgctatcctaaaatta

SEQ ID NO: 477 - DNA, 1200 bp, Homo sapiens
cttgagatctgcccaccgtggcttcccaaaatgctgggattataggcgtgagccaccgcacctagcctagattcaggctgcttctttttttttttttttttgagacagagtcttgctcttgttgcccaggctggagtgccatggcatgatctcagtgcaccacaatctctgcttcccaggtttaagcgattctcctgcctcagcctcccaagtagatgggatcacaggcatgagccaccatgcctggctaattttgtattttttgtacagacggggtttctccatgttggtcaggccagtctcgaactccctacctcaggtgatctgcctgcctcggcctctcaaagtgctgggattacaggtgtgagccactgcgcccagcagattcaagctttttaaatggaattttgagctgatttagttgagacttacgtgcttagttgataaattttaattttatactaaaatattttacattaattcaagttaatttatttcagattgaatttagtggaagcttttgtagaagatgcagaattgaggcagactttacaagaagatttacttcgtcgattcccagatcttaaccgacttgccaagaagtttcaaagacaagcagcaaacttacaagattgttaccgactctatcagggtataaatcaactacctaatgttatacaggctctggaaaaacatgaaggtaacaagtgattttgtttttttgttttccttcaactcatacaatatatacttggcaatgtgctgtcctcataaagttggtggtggtgactcactcttaggacacattcagatttcttttttttttttttttgagaaggagtcttgctccgttgccaaggctagagtgcagtggcacaatctcagctcactgcaacctctgcctcctgggttcaagcgattctcctgcctcagcttcctgagtggctgggattacaggcatgtgccaccatgcccggctaatttttgtacttttagttttaccatgttggccaggttcgtctggaactcccaatctcaggtgacccacctgcctcggcctcccaaagtgctgggagtacaggcgtgagccacagagcctggccatgttcagacttctaataacaggtttgtattgactcttagcctcatggcagaagccaagagacatgagacagcttagaaatttttgctttttggaaa

SEQ ID NO: 478 - DNA, 1110 bp, Homo sapiens
gggattataggcatgagccatcatgtccggcctccccatcatgtacccttaaataccatcaagcacagttccattgtgtaaaaacttggcttgatttaacctgttaattggaacactgtcattaatggaaattaggaatatgaggtaagctagaggttttattttaatgactttgggttattaaatctataagaaatgaaattcatttagtcataattaatgtcatgtttctgcatctatattacttgttgggtttacagacgaggtagtgtattattagtgggaagctttgagtgctacatcatctccctttctataaaataaattgagtacgaaacaatttgaattaaaacacctgagtaaatagtaactttggagacctgctgtactatttgtaccttttggatcaaatgatgcttgtttatctcagtcaaaattttatgatttgtattctgtaaaatgagatctttttatttgtttgttttactactttcttttaggaaaacaccagaaattattgttggcagtttttgtgactcctcttactgatcttcgttctgacttctccaagtttcaggaaatgatagaaacaactttagatatggatcaggtatgcaatatactttttaatttaagcagtagttatttttaaaaagcaaaggccactttaagaaagtttgtagatttttctttttagtatctaattgtagcacctttgtggacagtggatgtaatattaagtgacagatgggaaaaggatttttaaaaaaatagcaactgtttcagtggatgaaataaagattattagcagagaaaatgaatattgggcataactgtcctggtgaaagacaatctcataaatgaacaatttcataatttcgtaaatgcaactgcattttattttcaaagagaaggaaaattatagtcactggaaacggaaagagaagttagaggtaaacataggacacacaagaaaactttcattttgtttattttcttgtttttcttttgagacagggtttccctctgttacccaggcttaagtgcagtgacactatcatagttcactaacccctcaaattcctgggttcaagtaatcctcctgcctta

SEQ ID NO: 479 - DNA, 1124 bp, Homo sapiens
attactggtaagaatttagtgaaacaaagtacttaagagtatgtctttaaattgtgagattttgatgaacttttaagaaataaaattctttagtttcttagagctttttgagatttctaaggtagatccttggtttgggcaacatataactattacaagttttgcacattgaacgttatttggtaatttttagagaggacattttaaatgtttaggaaaaatataaataaaatgtagaatactattgggggcatatacatcatcagcactgtaactgtttcatatgaatcatttttgtacatatagaactctaaagtcctaatgaacagaattttacatttctataaatagaaagtccttaatagttgtgactgaataacttatggatagcaaattatttaactgaaaacagtaaaatttaagtgggaggaaatatttgctttataatttctgtctttacccattatttataggattttgtcactttgttctgtttgcaggtggaaaaccatgaattccttgtaaaaccttcatttgatcctaatctcagtgaattaagagaaataatgaatgacttggaaaagaagatgcagtcaacattaataagtgcagccagagatcttggtaagaatgggtcattggaggttggaataattcttttgtctatacactgtatagacaaaatattgatgccagaattattttataagttccctgtccccaagatgatgacttcacatctctgtcaaacagaaatcgcccaacaggcccttgtatgatgtcatttaaacaagccctattttaaatgtcacctccactggtaacaggatactcctaggaggatcaccaagcccaattcttctaggagtagtgcattgattaggctttggggtttccaagcagttcattaatgtcacttttggaaaaagtctgtctttcataccagcttattaattccctatgggttcacacggttttttttcctggattttcatcaaacatgtgtaaggtactcagtacaaagaagtttagaaatccagaacaaagcagtgtatttaagtagtagtaaacttccagataatctgatgcccatatctacatatataaaaaatttgcaaatagtt

SEQ ID NO: 480 - DNA, 1151 bp, Homo sapiens
aacagaaaatatgtgcactagttttcctagagtttcattgtcagagtctcaagtttttgtttggaaattgtatttggtcacattaattatactctatgttagttccaaagaaatacctttggttaagaaaagaattctcatgcataactcctcgagggtggggttacaccttaatccatcctcaggtgctcatggtaattggggcaaatatgttgcccagtgctggtgctctgcagccttggatgggtttacccagaaagcagctttcaagtcagaaactaacattcataagggagttaaggattttataaatagatatccataattcatgtagttttcaagtaagtagtatttgaatcttttctggttagataataattgtgagtatgttgtcatataataacagtatgtttttcactatttaaataattttagaattacattgaaaaatggtagtaggtatttatggaatactttttcttttcttcttgattatcaaggcttggaccctggcaaacagattaaactggattccagtgcacagtttggatattactttcgtgtaacctgtaaggaagaaaaagtccttcgtaacaataaaaactttagtactgtagatatccagaagaatggtgttaaatttaccaacaggtttgcaagtcgttattatatttttaaccctttattaattccctaaatgctctaacatgatgtgaatgttctatgataagttttactaatgtagtcatcaggtaagagtcaagctttcttccatagagcagtcagctgtcgcaacaccatttgttaaatagtccgtctgttctccattgactgaagtggtactttgggtctattttaaagactctacttttacctcgtctcaccattcttttgtctacacaaaatatattttatcgcttattctgtgttaccatatctattagagctagttccccctcatatctctgctttagttattttcacatgtttcttttatcttttttttttttggagatggagtctcgctctgttgcccaggctggagtgcagtggcatgatctcggctcactgcaagctccgccttccgggttcacgccattctcctgcctcagcctcccgagtagctgggactacaggcgcccgccactgcg

SEQ ID NO: 481 - DNA, 1098 bp, Homo sapiens
tgggattacaagcacgcgccaccatgctgggctaatttttgtatttttagtagagacggggtttctccatgttggtcaggctggtctcgaactcctgacctcaggcaatccaccgacctcaggtgatccacccgcctcagcctcccaaagttctggggttacaggcgtgagccaccacgcccggctgtcttcaatcttaaataaggattccatttaaatattttgtaaaaggacacagatcacagttttactcaggggaatataattgttatagcaggaattgtgccattgcgctattccaaacagtgtaaaagaacattaataaattgaattctaactacatttgtccctaaggagttgttcgttttccacttgtatttccattttaattatcattatttggatgtttcataggatactttggatatgtttcacgtagtacacattgcttctagtacacattttaatatttttaataaaactgttatttcgatttgcagcaaattgacttctttaaatgaagagtataccaaaaataaaacagaatatgaagaagcccaggatgccattgttaaagaaattgtcaatatttcttcaggtaaacttaatagaactaataatgttctgaatgtcacctggcttttggtaacagaagaaaaatcatgatatttgaagtgtgttttgttattttcgcaagccattacattctgactatttaatatgttaggtttcctatataaaataaggcatggtatgttacagtaggacacataactggaagttactcttgcacatagaaacaaaaaatggcagaaaagcacaaaacttactatagttgtaacagggaaaggaaacactagggcctacaacgtactaatgtcttgggtcatctatgggctcatgaggctctaggttatggaagtaaataccactgaaaagcaaatattaattacacatgaggcaagcctttttgagttctgtatgtcattttgtagattttgagttcattctagtggcaccatttgagatcattttcatgtaattaaaggaacacagcaacctggcactgtgttattgcccttagaatggaatgaatat

SEQ ID NO: 482 - DNA, 1246 bp, Homo sapiens
ctcagcttactgcaacttccaccttctgggttcatgcaattctggtgcctcagcctcccaagtatctgggtttacagacatgcaccaccatacctggctaatttttgtatttttggtagagatggggtttcgccgtgttaccaggctggtcttgaattcctggccccatgtgatcccccggcctcatgcgatctgcccgcctcagcctccctaagtgctgggattataggcgtgagccacccaacccagccagtactctgtttttgatagctattcacaatgggaaaggatgtagcaacacattttaaccctatgttgagttttaggtgggttcctttgaaattttgttaaggctaacttttgttaatttttttaaaaaagtgtaaattaggaaatgggttttgaattcccaaatggggggattaaatgtatttttacggcttatatctgtttattattcagtattcctgtgtacattttctgtttttatttttatacaggctatgtagaaccaatgcagacactcaatgatgtgttagctcagctagatgctgttgtcagctttgctcacgtgtcaaatggagcacctgttccatatgtacgaccagccattttggagaaaggacaaggaagaattatattaaaagcatccaggcatgcttgtgttgaagttcaagatgaaattgcatttattcctaatgacgtatactttgaaaaagataaacagatgttccacatcattactggtaaaaaacctggtttttgggctttgtgggggtaacgttttgtttttttttttttttttttaatcttggagtagaaatatatttaaaattgatggagaaaattcccagttcttaacattagaaagggaatatattattcttaccagttagtaatctattcacatttggtttagagggaagatttagaaggtgagataaaagcttgtgagagaatagtgtattcatgtgaaacttcttccatgggttcagagcatttagaaacaaacatcccttcacactcaaagcttacctttgagccagtcctccaatagtgaggtctttgaaggtcaggccaaattggctgtgggaggacctcaggttaggataggaattattttaagacatggcactatattcatgtgaaactcgcaaaaactagccttgcatataggctcatgtatcatgtctcagctgagatgtttgagagatcttaactagattctagaaaacaaaaaaggaag

SEQ ID NO: 483 - DNA, 1205 bp, Homo sapiens
aattgcctgtttttcaaaagaaagatcatgtcttcaggtttttgtgtggggtttaaatgattcgaaagatttgaccatactgatacattcactagtaaccttagttactaatgagtaatggttttgagttaatcagttaggcctgaactacttttctggaagttagtaaattatctcacaggcagccctgtgagccatgggaaaatgtgtatatggtctttctaggccacagtcaaattacaggtatatttgtcatggcttctcttgatgaaaggcccagtatcggtttgtctgaagatatataatagcattgcttttgggggtaatatgggcagtaactctgtccacatctttgggcaggctgtggttctgcctttatatgctatgtcagtgtaaacctacgcgattaatcatcagtgtacagtttaggactaacaatccatttattagtagcagaaagaagtttaaaatcttgctttctgatataatttgttttgtaggccccaatatgggaggtaaatcaacatatattcgacaaactggggtgatagtactcatggcccaaattgggtgttttgtgccatgtgagtcagcagaagtgtccattgtggactgcatcttagcccgagtaggggctggtgacagtcaattgaaaggagtctccacgttcatggctgaaatgttggaaactgcttctatcctcaggtaagtgcatctcctagtcccttgaagatagaaatgtatgtctctgtcctgtgagaaggaaaagtatatttgcagattctcatgtaaaaacatctgagaatgtttgtcttagtttaatagttgttttcctgtggactttatatactttgtattgtcttaaaagagtgattgatggtagctacggaaaactttgatttttaaaattgtctctttaagtagacaatttataagctactggtacgagttcaccttataaatctccactaccatgtttttgcttggactgttcacacttcctggaatggtccttcttgccgtttatccaacttctttctaatttttaagtccctaatgatgggaattctatttctgtagtgatttttctggtcatacgaccgtaaggtcatgggtgtttttctctgaattcctcttgagatgcctgtaacttgaaccacgtttttattctagacattactgaaatgttttgtctttatttcact

SEQ ID NO: 484 - DNA, 1248 bp, Homo sapiens
tgataatgtaaaacaatattcaaaatctgtttttcctttcatccgttgtttgttcatgttcatgacctttttttttttttcctattctcctccctccctccctccctccctcccttccttccttccctccttccctccttccctccctccctcccacacaaaggtgtgtgctaccatacctggctagtttttaatttttttttttttttttttttttagaggcaaggtctcactatgttgctcaggctggtctgggctcaagtgatcctcccacctccgccttccaaagtgctgggattacagacgtgagccatcatgcctggcccttgcccatttttctattgaagttttagtgctttttattgactttgtttatatattaagataatccattatgtttgtggcatatccttcccaatgtattgtcttaattttgtttttgtatgtgtatgttaccacattttatgtgatgggaaatttcatgtaattatgtgcttcaggtctgcaaccaaagattcattaataatcatagatgaattgggaagaggaacttctacctacgatggatttgggttagcatgggctatatcagaatacattgcaacaaagattggtgctttttgcatgtttgcaacccattttcatgaacttactgccttggccaatcagataccaactgttaataatctacatgtcacagcactcaccactgaagagaccttaactatgctttatcaggtgaagaaaggtatgtactattggagtactctaaattcagaacttggtaatgggaaacttactacccttgaaatcatcagtaattgccttattctaagttagtataaattattgatgttgttatagaacccatttaccccttaattcacagtctgggggtaggaacatgtacatcatatttctgtatctcatagtaggaccactcattctaaagcattcacagaaagaattatctgtactctttttgggacagaatctcgttctgttgcccaggctggagtgcgatctcggctcactgcaacctccgcctcccgggttcaagcgattctcctgcctcagcttcccgagtagctgggattacaggcgcctgccaccacacctggctaatttttatatttttagtagagacggggtttcaccatgctggccaggctggtctcgaattcctgacctcaggcaatccacccgtctcggcctcccaaagtgctgggattacaggtgtgagccacc

SEQ ID NO: 485 - DNA, 1176 bp, Homo sapiens
ccctcctcttcctccttcccttcccccttcctccttcccttcccccttcctccttccctttcctcttccctttccccttcccttcccccttcccttccctcttcccttccccttcccctttcccctccccctctcctcccctcccttaccttcccatgaaatgagaaagcctcagagatagtggcttgattaatttttctttagattaagatatttgtctaagcctttaaggtttatctattgagcttttttgtctcctatttttatttttcctactatgtttgtcgaggataaaatacagcactgtgtgccaagtcataatcacttttcatttgagacttaattaaaatgcctttattttaatgatatatttggctaatgtatttgaagtaatccgaaattaagttttctaatgacaaggtgagaaggataaattccatttacataaattgctgtctcttctcatgctgtcccctcacgcttccccaaatttcttataggtgtctgtgatcaaagttttgggattcatgttgcagagcttgctaatttccctaagcatgtaatagagtgtgctaaacagaaagccctggaacttgaggagtttcagtatattggagaatcgcaaggatatgatatcatggaaccagcagcaaagaagtgctatctggaaagagaggtttgtcagtttgttttcatagtttaacttagcttctctattattacataaacaggacactaagatgaaggttttttgttgttgtttgttttcctctgtgtttctagtgcttattttttaatcagtttttttgatggcaaagaatctatctctgtgttattttgatttctgcagtatatacatctgcatgatcaatattcgatttcaagtaccaaagtaggagtaaaggaatattaacctaggtttaaaattagtcatttcactaaaattagttattatggacgatagatgtctaggtatatctttgttcataaacgaatatatcaagttcagttattaaattacacattaggtaagaaaaggacaaagaaataaaaaagcatgattcataattcctgccctctatttgtctagaatttagttgggaagataagaataacgaacgtgacacagagaataaagtggcatatgacaaatatttattcaagaaagctatatgt

SEQ ID NO: 486 - DNA, 1443 bp, Homo sapiens
gtgaggttggtaacattattcccattttatgaatgaggaatgtgtgttaaggagtttgcccaagagtcacatagcaagtcatagtcatgctctctgaagcagcaataacttggcaataaaataaaaatgaagcatcttctgtatgtgttaacttttcagtgactgtttatgccttccagtattctttgtaaaccttgaattctttttttcacagatgattaaagtttatcaattgtaaaggtggaggaatttgggaactagacagtgcacacataaataataaatatgttcttcaaatattgggtgggctaatgtgggaggagtttgagaccagcctgggcaacatagtgagaccctcgtctctaaaaatatgaaaaataaaaaaaaaattttttaaatgtgtgatatgtttagatggaaatgaaacaatttgtcactgtctaacatgacttttagaaaagatattttaattactaatgggacattcacatgtgtttcagcaaggtgaaaaaattattcaggagttcctgtccaaggtgaaacaaatgccctttactgaaatgtcagaagaaaacatcacaataaagttaaaacagctaaaagctgaagtaatagcaaagaataatagctttgtaaatgaaatcatttcacgaataaaagttactacgtgaaaaatcccagtaatggaatgaaggtaatattgataagctattgtctgtaatagttttatattgttttatattaaccctttttccatagtgttaactgtcagtgcccatgggctatcaacttaataagatatttagtaatattttactttgaggacattttcaaagatttttattttgaaaaatgagagctgtaactgaggactgtttgcaattgacataggcaataataagtgatgtgctgaattttataaataaaatcatgtagtttgtggaatttgagatgcattgtagttcttcgcagtgtgacttcaaatattttggaagaaacaaatagctcagagacctcgtaaaatatcttaaactggagggctccatggagatcattgcgagtgactcccccagaatgtccatctgttgacaggagccaggctggctgcatacgaattagctaaggagcttattatatatccagagtcctaccgtgagcctccatcccgtctgccattctcccatccctggtctatgataagacttagaaatctggattttaacaaaacgtttcagattgagaaccttgatttagtctacttctcctattttacaataaagagatgaagcggttaagaattagctaatcctacgcaaagtgagggaaaaaggacagtctttttaataaatgcggcgggctggtggggtatccatataggaagaaatgacattggacccctactccatgtcatatataaaaacctccactttgggaggcgaagca

SEQ ID NO: 487 - DNA, 1500 bp, Homo sapiens
acatgacttttagaaaagatattttaattactaatgggacattcacatgtgtttcagcaaggtgaaaaaattattcaggagttcctgtccaaggtgaaacaaatgccctttactgaaatgtcagaagaaaacatcacaataaagttaaaacagctaaaagctgaagtaatagcaaagaataatagctttgtaaatgaaatcatttcacgaataaaagttactacgtgaaaaatcccagtaatggaatgaaggtaatattgataagctattgtctgtaatagttttatattgttttatattaaccctttttccatagtgttaactgtcagtgcccatgggctatcaacttaataagatatttagtaatattttactttgaggacattttcaaagatttttattttgaaaaatgagagctgtaactgaggactgtttgcaattgacataggcaataataagtgatgtgctgaattttataaataaaatcatgtagtttgtggaatttgagatgcattgtagttcttcgcagtgtgacttcaaatattttggaagaaacaaatagctcagagacctcgtaaaatatcttaaactggagggctccatggagatcattgcgagtgactcccccagaatgtccatctgttgacaggagccaggctggctgcatacgaattagctaaggagcttattatatatccagagtcctaccgtgagcctccatcccgtctgccattctcccatccctggtctatgataagacttagaaatctggattttaacaaaacgtttcagattgagaaccttgatttagtctacttctcctattttacaataaagagatgaagcggttaagaattagctaatcctacgcaaagtgagggaaaaaggacagtctttttaataaatgcggcgggctggtggggtatccatataggaagaaatgacattggacccctactccatgtcatatataaaaacctccactttgggaggcgaagcaggcaatcacttgaactcaggagatcaagaccagcctggacaacatgacgaaaccccatctctacaaaaataaatgcaaaaattagccgggcatagtggtgcttgcctgtagtcccagctactcaggaggctgaggtgggaggatcacgtgatctgggagaggttgaggttacagtgagctgcactccatcctgggtaatacagtgataactgtgtctcaaacaaaacaaaacaaatcaccttcagtgatttttagaccaaatgtacaaggtaatactctcaaggttttaatgttttatagttctgcagaagataacataggaaaatatttttatgtccttggctttgggaagaatttaagtcacagaaaaacaccatccataaagtttgacttatttagctatttgaaattaacaacttctattaaaaggcaccacaagtgaaaagacatgaatcgtaatggaagaacatactggtacgttataaaatatcaaagagttg

SEQ ID NO: 488 - DNA, 4435 bp, Homo sapiens
ggcgaggcgcctgttgattggccactggggcccgggttcctccggcggagcgcgcctccccccagatttcccgccagcaggagccgcgcggtagatgcggtgcttttaggagctccgtccgacagaacggttgggccttgccggctgtcggtatgtcgcgacagagcaccctgtacagcttcttccccaagtctccggcgctgagtgatgccaacaaggcctcggccagggcctcacgcgaaggcggccgtgccgccgctgcccccggggcctctccttccccaggcggggatgcggcctggagcgaggctgggcctgggcccaggcccttggcgcgctccgcgtcaccgcccaaggcgaagaacctcaacggagggctgcggagatcggtagcgcctgctgcccccaccagttgtgacttctcaccaggagatttggtttgggccaagatggagggttacccctggtggccttgtctggtttacaaccacccctttgatggaacattcatccgcgagaaagggaaatcagtccgtgttcatgtacagttttttgatgacagcccaacaaggggctgggttagcaaaaggcttttaaagccatatacaggttcaaaatcaaaggaagcccagaagggaggtcatttttacagtgcaaagcctgaaatactgagagcaatgcaacgtgcagatgaagccttaaataaagacaagattaagaggcttgaattggcagtttgtgatgagccctcagagccagaagaggaagaagagatggaggtaggcacaacttacgtaacagataagagtgaagaagataatgaaattgagagtgaagaggaagtacagcctaagacacaaggatctaggcgaagtagccgccaaataaaaaaacgaagggtcatatcagattctgagagtgacattggtggctctgatgtggaatttaagccagacactaaggaggaaggaagcagtgatgaaataagcagtggagtgggggatagtgagagtgaaggcctgaacagccctgtcaaagttgctcgaaagcggaagagaatggtgactggaaatggctctcttaaaaggaaaagctctaggaaggaaacgccctcagccaccaaacaagcaactagcatttcatcagaaaccaagaatactttgagagctttctctgcccctcaaaattctgaatcccaagcccacgttagtggaggtggtgatgacagtagtcgccctactgtttggtatcatgaaactttagaatggcttaaggaggaaaagagaagagatgagcacaggaggaggcctgatcaccccgattttgatgcatctacactctatgtgcctgaggatttcctcaattcttgtactcctgggatgaggaagtggtggcagattaagtctcagaactttgatcttgtcatctgttacaaggtggggaaattttatgagctgtaccacatggatgctcttattggagtcagtgaactggggctggtattcatgaaaggcaactgggcccattctggctttcctgaaattgcatttggccgttattcagattccctggtgcagaagggctataaagtagcacgagtggaacagactgagactccagaaatgatggaggcacgatgtagaaagatggcacatatatccaagtatgatagagtggtgaggagggagatctgtaggatcattaccaagggtacacagacttacagtgtgctggaaggtgatccctctgagaactacagtaagtatcttcttagcctcaaagaaaaagaggaagattcttctggccatactcgtgcatatggtgtgtgctttgttgatacttcactgggaaagtttttcataggtcagttttcagatgatcgccattgttcgagatttaggactctagtggcacactatcccccagtacaagttttatttgaaaaaggaaatctctcaaaggaaactaaaacaattctaaagagttcattgtcctgttctcttcaggaaggtctgatacccggctcccagttttgggatgcatccaaaactttgagaactctccttgaggaagaatattttagggaaaagctaagtgatggcattggggtgatgttaccccaggtgcttaaaggtatgacttcagagtctgattccattgggttgacaccaggagagaaaagtgaattggccctctctgctctaggtggttgtgtcttctacctcaaaaaatgccttattgatcaggagcttttatcaatggctaattttgaagaatatattcccttggattctgacacagtcagcactacaagatctggtgctatcttcaccaaagcctatcaacgaatggtgctagatgcagtgacattaaacaacttggagatttttctgaatggaacaaatggttctactgaaggaaccctactagagagggttgatacttgccatactccttttggtaagcggctcctaaagcaatggctttgtgccccactctgtaaccattatgctattaatgatcgtctagatgccatagaagacctcatggttgtgcctgacaaaatctccgaagttgtagagcttctaaagaagcttccagatcttgagaggctactcagtaaaattcataatgttgggtctcccctgaagagtcagaaccacccagacagcagggctataatgtatgaagaaactacatacagcaagaagaagattattgattttctttctgctctggaaggattcaaagtaatgtgtaaaattatagggatcatggaagaagttgctgatggttttaagtctaaaatccttaagcaggtcatctctctgcagacaaaaaatcctgaaggtcgttttcctgatttgactgtagaattgaaccgatgggatacagcctttgaccatgaaaaggctcgaaagactggacttattactcccaaagcaggctttgactctgattatgaccaagctcttgctgacataagagaaaatgaacagagcctcctggaatacctagagaaacagcgcaacagaattggctgtaggaccatagtctattgggggattggtaggaaccgttaccagctggaaattcctgagaatttcaccactcgcaatttgccagaagaatacgagttgaaatctaccaagaagggctgtaaacgatactggaccaaaactattgaaaagaagttggctaatctcataaatgctgaagaacggagggatgtatcattgaaggactgcatgcggcgactgttctataactttgataaaaattacaaggactggcagtctgctgtagagtgtatcgcagtgttggatgttttactgtgcctggctaactatagtcgagggggtgatggtcctatgtgtcgcccagtaattctgttgccggaagataccccccccttcttagagcttaaaggatcacgccatccttgcattacgaagactttttttggagatgattttattcctaatgacattctaataggctgtgaggaagaggagcaggaaaatggcaaagcctattgtgtgcttgttactggaccaaatatggggggcaagtctacgcttatgagacaggctggcttattagctgtaatggcccagatgggttgttacgtccctgctgaagtgtgcaggctcacaccaattgatagagtgtttactagacttggtgcctcagacagaataatgtcaggtgaaagtacattttttgttgaattaagtgaaactgccagcatactcatgcatgcaacagcacattctctggtgcttgtggatgaattaggaagaggtactgcaacatttgatgggacggcaatagcaaatgcagttgttaaagaacttgctgagactataaaatgtcgtacattattttcaactcactaccattcattagtagaagattattctcaaaatgttgctgtgcgcctaggacatatggcatgcatggtagaaaatgaatgtgaagaccccagccaggagactattacgttcctctataaattcattaagggagcttgtcctaaaagctatggctttaatgcagcaaggcttgctaatctcccagaggaagttattcaaaagggacatagaaaagcaagagaatttgagaagatgaatcagtcactacgattatttcgggaagtttgcctggctagtgaaaggtcaactgtagatgctgaagctgtccataaattgctgactttgattaaggaattatagactgactacattggaagctttgagttgacttctgacaaaggtggtaaattcagacaacattatgatctaataaactttattttttaaaaatgaaaaaaaaaaaaaaaaaaaaaaaaaaaaaaaaaaaaaaaaaaaaaaaaaaaaaaaaaaaaaaaaaaaaaaaaaaaaaaaaaaaaaaaaaaaaaaaaaaaaaaaaaaaa

SEQ ID NO: 489 - DNA, 1500 bp, Homo sapiens
ttgtcgcccaggctggagtgcagtggcgcgaccttggctcactgcaaacgctgcctcccaggttcaagttattctcctgcctcagcctcccaagtagctgggattacaggcgcatgccaccacgcccggctaatttttggatttttagtagagacgggggtttcaccatgttgactaggctggtcttcaacgcctgacctcaggtgatccgcccgcctcggcatcccaaagtgctgggattacaggcgtgagccactgcgcccggcctctcatagtctcttagctttctaaaatttgaaaaatcctgtaaagacacacctgggtcaaagggctcagataacggactgtggcccttaagtacttacgtcacaggttattgagaggatcgatttagttaccagatgtaaaatgctgggatcagtgcctggcaaaggaaaactttgtacagctgcaggctttcaccatacacaacagcatcgctaacgaatgctattacaatattcatttagcgtttaccaagtgcctactctatacaaatcttgagaatacaacgtgaaggtgaactgctgactaaagtttggtccctttcgctccgtctccttgcgaaaatgctctaacggcaggaggtcacgcgagcgctggacgcgtttctccccgcgagcccctttccgaggcctttcgggtccccccggttatccccgcccgggcggtgcgcgcccccgctgttcccgcttccgctccagagaggcagggctttccgagcctgctagccccgcggccgcaactaaccccgggtcggagtgttccggcccggccagccccgcggcgtgagggaaggggagctcagcagttccccgcgcggggcccaggcgtcggcggcagggcgggcccctcaccgccagcgtgccagccccgcccctacccaccagtgtgccagccccgcccttccccacgtcgccgcgcgcccgggggcggggcctggcgcgcaccgcccgcgcacggcgaggcgcctgttgattggccactggggcccgggttcctccggcggagcgcgcctccccccagatttcccgccagcaggagccgcgcggtagatgcggtgcttttaggagctccgtccgacagaacggttgggccttgccggctgtcggtatgtcgcgacagagcaccctgtacagcttcttccccaagtctccggcgctgagtgatgccaacaaggcctcggccagggcctcacgcgaaggcggccgtgccgccgctgcccccggggcctctccttccccaggcggggatgcggcctggagcgaggctgggcctgggcccaggcccttggcgcgctccgcgtcaccgcccaaggcgaagaacctcaacggagggctgcggagatcggtagcgcctgctgcccccaccaggtagcggggtgggggtggggtcgaaggcgggggcatagcggcggggcgcttggaacccggcgaggggaggctcgcacagggggttggg

SEQ ID NO: 490 - DNA, 1412 bp, Homo sapiens
ttcatttagcgtttaccaagtgcctactctatacaaatcttgagaatacaacgtgaaggtgaactgctgactaaagtttggtccctttcgctccgtctccttgcgaaaatgctctaacggcaggaggtcacgcgagcgctggacgcgtttctccccgcgagcccctttccgaggcctttcgggtccccccggttatccccgcccgggcggtgcgcgcccccgctgttcccgcttccgctccagagaggcagggctttccgagcctgctagccccgcggccgcaactaaccccgggtcggagtgttccggcccggccagccccgcggcgtgagggaaggggagctcagcagttccccgcgcggggcccaggcgtcggcggcagggcgggcccctcaccgccagcgtgccagccccgcccctacccaccagtgtgccagccccgcccttccccacgtcgccgcgcgcccgggggcggggcctggcgcgcaccgcccgcgcacggcgaggcgcctgttgattggccactggggcccgggttcctccggcggagcgcgcctccccccagatttcccgccagcaggagccgcgcggtagatgcggtgcttttaggagctccgtccgacagaacggttgggccttgccggctgtcggtatgtcgcgacagagcaccctgtacagcttcttccccaagtctccggcgctgagtgatgccaacaaggcctcggccagggcctcacgcgaaggcggccgtgccgccgctgcccccggggcctctccttccccaggcggggatgcggcctggagcgaggctgggcctgggcccaggcccttggcgcgctccgcgtcaccgcccaaggcgaagaacctcaacggagggctgcggagatcggtagcgcctgctgcccccaccaggtagcggggtgggggtggggtcgaaggcgggggcatagcggcggggcgcttggaacccggcgaggggaggctcgcacagggggttgggggggtgcacggcctggccctgggctcggaggaggcggggccgcagagttggcttgaatgagtgcaggggtcgagtctggagcatttgggggtgtagcttgtaaacagggtcggaggagagaggctgtgcaggaagagggctgcaggggagacgcggagagttcgggccttttggagggaggagacgcgtcccgccaggtgggggtgctgggctaaggaaggggcgacgcgcgcagctccgggtggggagggggcctgggaggtgggagcactgggggtggggcgagaaggggaaggcgcccggcccacttggtgggcggggcggggggcggggtggcgggaaggaggaatgcctgcgggaggccgaacggggagagtccggtggtgtggggtgcgaaaggaggttcctcggc

SEQ ID NO: 491 - DNA, 1197 bp, Homo sapiens
gcttttggaatacataggagtgtaactggaaaaagattccaagcaagtctaatgaattagataatttacctaattagtaaattatgtaatcagtatgctttataataatattgtgagttagatcctgtttctgatatgtacataccatattgtataggtgctactaatttggagagcatatacagtgagtccatgcctttttcctgccatcagcattataccaaaattctgccatggtttttaaactttgattctgagaaagtttctcaccctaataacataactatatttgtgtttgtcttcatagttaaatatgcattatgatatcagcttgcatacattttttaaatgacttgaatatctgactttaaaaattattctagaatttctgtgcttcaatattaatgccagaagacttggaattgtttatttgtaggtaactgcctttaaggaaacttgaccaaatattaactaagttatgtatttccttttggcaacagttgtgacttctcaccaggagatttggtttgggccaagatggagggttacccctggtggccttgtctggtttacaaccacccctttgatggaacattcatccgcgagaaagggaaatcagtccgtgttcatgtacagttttttgatgacagcccaacaaggggctgggttagcaaaaggcttttaaagccatatacaggtaagagtcactactgccatgtgtgtgtgtttgtgtgtgtgtgtgtgtgtgtgagagaaacagacagacaggcagacttttttctatatgatgaaattaagtgtattttaccccagtaaattgcaaggggtggcagttgtgaaagcttctggcatgggaaagggatgtaacatggtctttagctggtttgttttgtggaatggaatttttatttctgtcctttgagtgacttacagcaatattatacccttaataagggtaaactaaactgtccccccatcttgaagggtccaagagaaagttaatgtcatcaggatacatagcctatagatagcgacattctctagggaaagatggagatgcgcactacctggccttcaaactactcactaatgaacacatctgagttgagtttcacaccaaactcctggaaccataactttcttttcccagatctagtcttgtttatcacagacatcaacagcctggcatgtttagcc

SEQ ID NO: 492 - DNA, 1170 bp, Homo sapiens
gtcaagtgtccagccaacaagttattttatgtgtgtgtgtgtgtgtgtgtgtgtgtatacatatatacatttttttttttttttttcatcgagacagggtcttgcactgtcgcccaggctggagtgaagtggtgcaatctcggctcactgcaacctctgcctcccaggtttaagtgatcttcccacctcagcctcccaagtagctgggactacaggcgcacaccaccacccttggctaatttttgtattttttttttggtagagatggggtttcaccacattgcccaggctggtcttgaattcctgacctcaagtagtccgcccacctaagcctcccaaaatgctgggattacaggcgtgagccaccacacctggcatatatatattttaagatagagatggggtttgctatgttgcccaggctggtcttgaactgctgggattacaggcgtgagcctctgcacccggcccttattgtttataaatacatttctttctaggttcaaaatcaaaggaagcccagaagggaggtcatttttacagtgcaaagcctgaaatactgagagcaatgcaacgtgcagatgaagccttaaataaagacaagattaagaggcttgaattggcagtttgtgatgagccctcagagccagaagaggaagaagagatggaggtgggacacggcaagcattcagttgttatttatgttagggtgatgggggaagaaagggggagggtgtattaacaagataccttgttttatatatgtgtgtgtatatgtattattttattatacatacatgcatacttctgtagttccctggactgtaggataagttaggttacttagaatctcaacagctagcatcgtttttacttaggttttcaagcctactggcagggtaagcaagaggtagtaccattttggtaagaagtagagagctagggacagtaaagatggagtaatatatatatgagggtatagtcaggccctagaaattaattatccagttttatgctttttataaaaaaactgagatggggtcttgctatgttgcccaggctggtctcaaactcctgagttcaagggatctgcccacctgggcctcccaaagtgttgggattacaggcatgagccacagcacccagccccagctttatgcttttaattct

SEQ ID NO: 493 - DNA, 3545 bp, Homo sapiens
ttgcaggagaactattggcatggaaaatgacaattgttttaatgtcaagtgaaactgaagttgatgttcattgagaggtttctaatttctagaggtgggttctttttttggcatatgaagttgcagcatattaagagaatttacagtagtacagatggggttatcccatccacaacttatgatggggttacataaactaaaaacgtgtttaatacacctaccccaccgaatattgtagcttgggcgtagcctaacctatctcagacgtgctcagaacacttaaatgttagcctaaagttgggcaagatcatctaacacaaagcctattttataataaggaattgcctatctcatgtaattcatcgaatactgtactaaaaatgaaaaacagtggctgcacgggtaccattataaagtcaaaaaatcataagttgaactgtcttacattatggttttccaaattttgatttgtttttaaatactctttccttgcctggcaggtaggcacaacttacgtaacagataagagtgaagaagataatgaaattgagagtgaagaggaagtacagcctaagacacaaggatctaggcgaagtagccgccaaataaaaaaacgaagggtcatatcagattctgagagtgacattggtggctctgatgtggaatttaagccagacactaaggaggaaggaagcagtgatgaaataagcagtggagtgggggatagtgagagtgaaggcctgaacagccctgtcaaagttgctcgaaagcggaagagaatggtgactggaaatggctctcttaaaaggaaaagctctaggaaggaaacgccctcagccaccaaacaagcaactagcatttcatcagaaaccaagaatactttgagagctttctctgcccctcaaaattctgaatcccaagcccacgttagtggaggtggtgatgacagtagtcgccctactgtttggtatcatgaaactttagaatggcttaaggaggaaaagagaagagatgagcacaggaggaggcctgatcaccccgattttgatgcatctacactctatgtgcctgaggatttcctcaattcttgtactcctgggatgaggaagtggtggcagattaagtctcagaactttgatcttgtcatctgttacaaggtggggaaattttatgagctgtaccacatggatgctcttattggagtcagtgaactggggctggtattcatgaaaggcaactgggcccattctggctttcctgaaattgcatttggccgttattcagattccctggtgcagaagggctataaagtagcacgagtggaacagactgagactccagaaatgatggaggcacgatgtagaaagatggcacatatatccaagtatgatagagtggtgaggagggagatctgtaggatcattaccaagggtacacagacttacagtgtgctggaaggtgatccctctgagaactacagtaagtatcttcttagcctcaaagaaaaagaggaagattcttctggccatactcgtgcatatggtgtgtgctttgttgatacttcactgggaaagtttttcataggtcagttttcagatgatcgccattgttcgagatttaggactctagtggcacactatcccccagtacaagttttatttgaaaaaggaaatctctcaaaggaaactaaaacaattctaaagagttcattgtcctgttctcttcaggaaggtctgatacccggctcccagttttgggatgcatccaaaactttgagaactctccttgaggaagaatattttagggaaaagctaagtgatggcattggggtgatgttaccccaggtgcttaaaggtatgacttcagagtctgattccattgggttgacaccaggagagaaaagtgaattggccctctctgctctaggtggttgtgtcttctacctcaaaaaatgccttattgatcaggagcttttatcaatggctaattttgaagaatatattcccttggattctgacacagtcagcactacaagatctggtgctatcttcaccaaagcctatcaacgaatggtgctagatgcagtgacattaaacaacttggagatttttctgaatggaacaaatggttctactgaaggaaccctactagagagggttgatacttgccatactccttttggtaagcggctcctaaagcaatggctttgtgccccactctgtaaccattatgctattaatgatcgtctagatgccatagaagacctcatggttgtgcctgacaaaatctccgaagttgtagagcttctaaagaagcttccagatcttgagaggctactcagtaaaattcataatgttgggtctcccctgaagagtcagaaccacccagacagcagggctataatgtatgaagaaactacatacagcaagaagaagattattgattttctttctgctctggaaggattcaaagtaatgtgtaaaattatagggatcatggaagaagttgctgatggttttaagtctaaaatccttaagcaggtcatctctctgcagacaaaaaatcctgaaggtcgttttcctgatttgactgtagaattgaaccgatgggatacagcctttgaccatgaaaaggctcgaaagactggacttattactcccaaagcaggctttgactctgattatgaccaagctcttgctgacataagagaaaatgaacagagcctcctggaatacctagagaaacagcgcaacagaattggctgtaggaccatagtctattgggggattggtaggaaccgttaccagctggaaattcctgagaatttcaccactcgcaatttgccagaagaatacgagttgaaatctaccaagaagggctgtaaacgatactggaccaaaactattgaaaagaagttggctaatctcataaatgctgaagaacggagggatgtatcattgaaggactgcatgcggcgactgttctataactttgataaaaattacaaggactggcagtctgctgtagagtgtatcgcagtgttgggtaagactttgaacaagcttgttctcaggctttgataagtagtgctgtttgccagctgtatattatccctaaaaataagtaataaggtatatatggtacatattttgacatgcatatacatatttgcatcctgactaggctgcccacagcaatttaagttacttgaaactcgcttttatcttagtagccctttggcctttcttcagtttttttttttttttttttttttttgagacatggtcttgctctgttgcccaggctagaatatggtgacacaaccatggctactgcagcctcgacctcccaggcttaagtgatctttccacctcagcctcccaagtagctgagattacagatatgcaccaccatgcatggctaatatttaaatgtttgtagagagatggggtctcactgtgttgccaggactggtcttgaactcctgggctcaagtgatcctcctgcctcggcttcccaaagtgctgaggttacaggcatgaccc

SEQ ID NO: 494 - DNA, 1266 bp, Homo sapiens
gttttgttttttgagacagagtctctctgtcgcccaggctggagtgcattggtgcgatcttggctcattgcaacctctgcctcccaggttcaagtgattctcctgcctcagcctcctgcgtagctgggattacaggcatatgccacgtgtattaggcactgctaatttctgtatttttagtagagacgaggtttcaccatgttggtcaggctggtcctgaactgctgacctcgtgaactctgcccgcctaggcctcctgaagtgctgggattacaggcgtgagccaccgtgcctggcctctgctctatcttttagctttcccttggcacttctatggtccagatgttagagggtaagtattttgatgggggagatcgttggactgtaattgaaagttatgtcttataatgaaatgtgttatataaagaagacctataaaacacttaggctgataaaacccccaaacgatgaagcctcacttttaccctctcttttaacagatgttttactgtgcctggctaactatagtcgagggggtgatggtcctatgtgtcgcccagtaattctgttgccggaagataccccccccttcttagagcttaaaggatcacgccatccttgcattacgaagactttttttggagatgattttattcctaatgacattctaataggctgtgaggaagaggagcaggaaaatggcaaagcctattgtgtgcttgttactggaccaaatatggggggcaagtctacgcttatgagacaggtaactgattcttaaagttttgttatcagaaagtcatttgtgacattaggaataacatacttaggtgatcattttccaaacacagttacataaaagtcagccagtgacttaataggaagcaaagggaaattactccctgtgttataaaattgagaattatatttagctgaaacatcgatgcttaatgttaaggggaatatatgttaaaaaggggaaggaggtcagtcattcaggtcatgaggccctttgacttgaattcatttcctcagaaggtaggtatattcatagtgaacaaaaatacaaaggctgtatgaaaagatgaaaatgttacaggtttatccttaaattagactcatttgcagaaatgcaaatgaggtaagaaagcaaatatagttcatgacctctagcaactgttgaaaactgctctttagggatgacatgctggcccttttttttttgttgttgccaaggctgaagtgcagtggcaccatcacagctca

SEQ ID NO: 495 - DNA, 1118 bp, Homo sapiens
ctgctctcctgcattatagtatacttctgttcacctagtttgctagagagaggcagtatagtgtgtatagtgatttccaaactttttctttaaatcagaatcacctgaaagaatgtgacaacgtgtaaaaaaaaaaaaaaaggtgcagagattccatcctgacatggattcacttgattggaattgattctaggcatctcagtagttttaaagagctcctaggtgattctattctggccagcgttgagaatcactagggtagtgggttggtaagcaggctctgatgttttaaaggccaggtgaggccctatgcctcttgtctctcttagcctcaactttctccatgttagcaaatggatttcagaacagaaccaacgtacatgtgattgtgaaagttgttttagagtgcctagctcttacgtaagggttcataagaaagacaaaagtttatgaaactgttactaccagtcataaaagaccttttcctccctcattcacaggctggcttattagctgtaatggcccagatgggttgttacgtccctgctgaagtgtgcaggctcacaccaattgatagagtgtttactagacttggtgcctcagacagaataatgtcaggtgagttttttgtttcccacttaagttctcattcagtcatttagatgtgataaaagatatttgcttcttgtatatgagccttttaaatctaatatttgatttttctggtgttactttaaaaacatcactttttaagaactgcatagtctctctctcttttttttttttttgagatggagtttccctcttgttgcccaagctggagtgcaatggcacgatcttggctcactgcaacctctgcttccaggttcaagtgattctcctgcctcagcctctcgagtagctgggattacaggcgcatgccatcacgcccagctaattttttgtatttttagtagaagcggggtttcaccatgttaggctggtctcttaactcctgacctcaggtgatctgcttgcctcggcctcccaaagtgctgggattacaggcgtgagccaccgtgcccggccaataattgcatagtctcttaatgagatttaatcttttataccaatatgtg

SEQ ID NO: 496 - DNA, 1090 bp, Homo sapiens
aatatttgatttttctggtgttactttaaaaacatcactttttaagaactgcatagtctctctctcttttttttttttttgagatggagtttccctcttgttgcccaagctggagtgcaatggcacgatcttggctcactgcaacctctgcttccaggttcaagtgattctcctgcctcagcctctcgagtagctgggattacaggcgcatgccatcacgcccagctaattttttgtatttttagtagaagcggggtttcaccatgttaggctggtctcttaactcctgacctcaggtgatctgcttgcctcggcctcccaaagtgctgggattacaggcgtgagccaccgtgcccggccaataattgcatagtctcttaatgagatttaatcttttataccaatatgtgtagctcatgatagctatataacctagaagatgaatttatgtaatatgatttgcaaaatgagtattcatttgtgatttttttttttttaaggtgaaagtacattttttgttgaattaagtgaaactgccagcatactcatgcatgcaacagcacattctctggtgcttgtggatgaattaggtaagacattaaacttctcatttgaagactatctatcttaaaaacatttgtacaaataactatttttatagaagattatctgaagtacatttaaacaatatgaatgtttttagagcacgcactcaccattgtggcacagaccgatagttggagataaaaggtgatattgtgaaaggtttttgattacccattaattattaggccttacactgtttagttgtaataaaacatttgttatactacggggatgagaacactaataggaggactcaggaagtttatgaccttgagcgatactgtattttctttaaaagaaacctcactccccatgggctgctaagcagactcgtgtagctaaacaaggcctatttatagaatgcttttagacgtggatgtactaaccgatgttgcttttctgtcctagcatttttgttttaattccttttttgttttaattcctttgagttacttccttatgcatattttactttaacaggaag

SEQ ID NO: 497 - DNA, 1155 bp, Homo sapiens
ttaggtaagacattaaacttctcatttgaagactatctatcttaaaaacatttgtacaaataactatttttatagaagattatctgaagtacatttaaacaatatgaatgtttttagagcacgcactcaccattgtggcacagaccgatagttggagataaaaggtgatattgtgaaaggtttttgattacccattaattattaggccttacactgtttagttgtaataaaacatttgttatactacggggatgagaacactaataggaggactcaggaagtttatgaccttgagcgatactgtattttctttaaaagaaacctcactccccatgggctgctaagcagactcgtgtagctaaacaaggcctatttatagaatgcttttagacgtggatgtactaaccgatgttgcttttctgtcctagcatttttgttttaattccttttttgttttaattcctttgagttacttccttatgcatattttactttaacaggaagaggtactgcaacatttgatgggacggcaatagcaaatgcagttgttaaagaacttgctgagactataaaatgtcgtacattattttcaactcactaccattcattagtagaagattattctcaaaatgttgctgtgcgcctaggacatatggtatgtgcaaattgtttttttccacaaattcggttttttgagagggcacttctcttgctagcacatgtatcgctaatatttttctttcttaaggcatgcatggtagaaaatgaatgtgaagaccccagccaggagactattacgttcctctataaattcattaagggagcttgtcctaaaagctatggctttaatgcagcaaggcttgctaatctcccagaggaagttattcaaaagggacatagaaaagcaagagaatttgagaagatgaatcagtcactacgattatttcggtaactaactaactataatggaattataactaactgaccttaagtttcaaagaaacagtaaaaggggaagggatgatgcactatgaaaaaacaaaaaaacttttttttttttttttttaattttaagggaagtttgcctggctagtgaaaggtcaactgtagatgctgaagctgtccataaattgctgactttgattaaggaattat

SEQ ID NO: 498 - DNA, 1200 bp, Homo sapiens
gggatgagaacactaataggaggactcaggaagtttatgaccttgagcgatactgtattttctttaaaagaaacctcactccccatgggctgctaagcagactcgtgtagctaaacaaggcctatttatagaatgcttttagacgtggatgtactaaccgatgttgcttttctgtcctagcatttttgttttaattccttttttgttttaattcctttgagttacttccttatgcatattttactttaacaggaagaggtactgcaacatttgatgggacggcaatagcaaatgcagttgttaaagaacttgctgagactataaaatgtcgtacattattttcaactcactaccattcattagtagaagattattctcaaaatgttgctgtgcgcctaggacatatggtatgtgcaaattgtttttttccacaaattcggttttttgagagggcacttctcttgctagcacatgtatcgctaatatttttctttcttaaggcatgcatggtagaaaatgaatgtgaagaccccagccaggagactattacgttcctctataaattcattaagggagcttgtcctaaaagctatggctttaatgcagcaaggcttgctaatctcccagaggaagttattcaaaagggacatagaaaagcaagagaatttgagaagatgaatcagtcactacgattatttcggtaactaactaactataatggaattataactaactgaccttaagtttcaaagaaacagtaaaaggggaagggatgatgcactatgaaaaaacaaaaaaacttttttttttttttttttaattttaagggaagtttgcctggctagtgaaaggtcaactgtagatgctgaagctgtccataaattgctgactttgattaaggaattatagactgactacattggaagctttgagttgacttctgacaaaggtggtaaattcagacaacattatgatctaataaactttattttttaaaaatgaccatttttccattttctttctaggaaattaaacccttttaattcttatctaccttctacataatggttattgaatactccacaatatattaagtctagatgttatggtacatgcatacactttcaggctgttttatacccactgtcaccaatacacataaatgggggaggaaaagctatgaaactgtatagggctgta

SEQ ID NO: 499 - DNA, 1175 bp, Homo sapiens
gtcgtacattattttcaactcactaccattcattagtagaagattattctcaaaatgttgctgtgcgcctaggacatatggtatgtgcaaattgtttttttccacaaattcggttttttgagagggcacttctcttgctagcacatgtatcgctaatatttttctttcttaaggcatgcatggtagaaaatgaatgtgaagaccccagccaggagactattacgttcctctataaattcattaagggagcttgtcctaaaagctatggctttaatgcagcaaggcttgctaatctcccagaggaagttattcaaaagggacatagaaaagcaagagaatttgagaagatgaatcagtcactacgattatttcggtaactaactaactataatggaattataactaactgaccttaagtttcaaagaaacagtaaaaggggaagggatgatgcactatgaaaaaacaaaaaaacttttttttttttttttttaattttaagggaagtttgcctggctagtgaaaggtcaactgtagatgctgaagctgtccataaattgctgactttgattaaggaattatagactgactacattggaagctttgagttgacttctgacaaaggtggtaaattcagacaacattatgatctaataaactttattttttaaaaatgaccatttttccattttctttctaggaaattaaacccttttaattcttatctaccttctacataatggttattgaatactccacaatatattaagtctagatgttatggtacatgcatacactttcaggctgttttatacccactgtcaccaatacacataaatgggggaggaaaagctatgaaactgtatagggctgtatatatacttgtctcagcttaatgcaggaaattggtttaatttccagcagttttgtctaaactgttcaaaaaaaaactatgaacagagttcaaatacaggactgtttgttttgaagagactttctaaagtgtacttaaaacatagtagttttttacctttcacaaaactgagttacaagaatacttttgttttacagtgcatcccttcctaggaagtctcattaaaacactcactttttctaggggtgattttgaatgctgcacagggaagggaaggaaataatagtcttaacttttcttaaa

SEQ ID NO: 500 - DNA, 1500 bp, Homo sapiens
atgcatggtagaaaatgaatgtgaagaccccagccaggagactattacgttcctctataaattcattaagggagcttgtcctaaaagctatggctttaatgcagcaaggcttgctaatctcccagaggaagttattcaaaagggacatagaaaagcaagagaatttgagaagatgaatcagtcactacgattatttcggtaactaactaactataatggaattataactaactgaccttaagtttcaaagaaacagtaaaaggggaagggatgatgcactatgaaaaaacaaaaaaacttttttttttttttttttaattttaagggaagtttgcctggctagtgaaaggtcaactgtagatgctgaagctgtccataaattgctgactttgattaaggaattatagactgactacattggaagctttgagttgacttctgacaaaggtggtaaattcagacaacattatgatctaataaactttattttttaaaaatgaccatttttccattttctttctaggaaattaaacccttttaattcttatctaccttctacataatggttattgaatactccacaatatattaagtctagatgttatggtacatgcatacactttcaggctgttttatacccactgtcaccaatacacataaatgggggaggaaaagctatgaaactgtatagggctgtatatatacttgtctcagcttaatgcaggaaattggtttaatttccagcagttttgtctaaactgttcaaaaaaaaactatgaacagagttcaaatacaggactgtttgttttgaagagactttctaaagtgtacttaaaacatagtagttttttacctttcacaaaactgagttacaagaatacttttgttttacagtgcatcccttcctaggaagtctcattaaaacactcactttttctaggggtgattttgaatgctgcacagggaagggaaggaaataatagtcttaacttttcttaaaggataccagaaacattgctggatataatttaagattagtgttttctctttcatagaaagaacgtacatactgggacatgagtacagttacagcaagtctaggtgtgctaacaaaacagggcacattcaagtacagtaagattttgcttgaaattaaaaacaaactacatgagattaaagcattaaaatcatatttctcaatctgaatacatgttaaaaaaaaaaaatcaaaaggaacgcagaagtgctagctcacatttttaccatattacaaaagcaattggtacccatgtccataaaggcagcaacaaagctgcttgtctattgaagattactactgcaaattggactgcattcaatgctagttgtaaaaacaccagcttttcagaagttggtatctgtacaaaattgcagcttattttcttcacttctgtcccttcaagtctttacacagtaatgctaaaacacccagctttgagatcctgagtcaatatattgcca

SEQ ID NO: 501 - DNA, 1936 bp, Homo sapiens
cagccggagccgcggtgtacaacggaacttgtagtctcctcgtggctagttcaggcggaaggagcagtcctctgaagcttgaggagcctctagaactatgagcccgaggccttcccctctcccagagcgcagaggctttgaaggctacctctgggaagccgctcaccgtcggaagctgcgggagctgaaactgcgccatcgtcactgtcggcggccatgacaccgctcgtctcccgcctgagtcgtctgtgggccatcatgaggaagccacgagcagccgtgggaagtggtcacaggaagcaggcagccagccaggaagggaggcagaagcatgctaagaacaacagtcaggccaagccttctgcctgtgatgggatgattgctgagtgtcctggggccccagcaggcctggccaggcagccggaagaggtggtattgcaggcctctgtctcctcataccatctattcagagacgtagctgaagtcacagccttccgagggagcctgctaagctggtacgaccaagagaaacgggacctaccatggagaagacgggcagaagatgagatggacctggacaggcgggcatatgctgtgtgggtctcagaggtcatgctgcagcagacccaggttgccactgtgatcaactactataccggatggatgcagaagtggcctacactgcaggacctggccagtgcttccctggaggaggtgaatcaactctgggctggcctgggctactattctcgtggccggcggctgcaggagggagctcggaaggtggtagaggagctagggggccacatgccacgtacagcagagaccctgcagcagctcctgcctggcgtggggcgctacacagctggggccattgcctctatcgcctttggccaggcaaccggtgtggtggatggcaacgtagcacgggtgctgtgccgtgtccgagccattggtgctgatcccagcagcacccttgtttcccagcagctctggggtctagcccagcagctggtggacccagcccggccaggagatttcaaccaagcagccatggagctaggggccacagtgtgtaccccacagcgcccactgtgcagccagtgccctgtggagagcctgtgccgggcacgccagagagtggagcaggaacagctcttagcctcagggagcctgtcgggcagtcctgacgtggaggagtgtgctcccaacactggacagtgccacctgtgcctgcctccctcggagccctgggaccagaccctgggagtggtcaacttccccagaaaggccagccgcaagccccccagggaggagagctctgccacctgtgttctggaacagcctggggcccttggggcccaaattctgctggtgcagaggcccaactcaggtctgctggcaggactgtgggagttcccgtccgtgacctgggagccctcagagcagcttcagcgcaaggccctgctgcaggaactacagcgttgggctgggcccctcccagccacgcacctccggcaccttggggaggttgtccacaccttctctcacatcaagctgacatatcaagtatatgggctggccttggaagggcagaccccagtgaccaccgtaccaccaggtgctcgctggctgacgcaggaggaatttcacaccgcagctgtttccaccgccatgaaaaaggttttccgtgtgtatcagggccaacagccagggacctgtatgggttccaaaaggtcccaggtgtcctctccgtgcagtcggaaaaagccccgcatgggccagcaagtcctggataatttctttcggtctcacatctccactgatgcacacagcctcaacagtgcagcccagtgacacctctgaaagcccccattccctgagaatcctgttgttagtaaagtgcttatttttgtagttaaaaaaaaaaaaaaaa

SEQ ID NO: 502 - DNA, 1905 bp, Homo sapiens
cagccggagccgcggtgtacaacggaacttgtagtctcctcgtggctagttcaggcggaaggagcagtcctctgaagcttgaggagcctctagaactatgagcccgaggccttcccctctcccagagcgcagaggctttgaaggctacctctgggaagccgctcaccgtcggaagctgcgggagctgaaactgcgccatcgtcactgtcggcggccatgacaccgctcgtctcccgcctgagtcgtctgtgggccatcatgaggaagccacgagcagccgtgggaagtggtcacaggaagcaggcagccagccaggaagggaggcagaagcatgctaagaacaacagtcaggccaagccttctgcctgtgatggcctggccaggcagccggaagaggtggtattgcaggcctctgtctcctcataccatctattcagagacgtagctgaagtcacagccttccgagggagcctgctaagctggtacgaccaagagaaacgggacctaccatggagaagacgggcagaagatgagatggacctggacaggcgggcatatgctgtgtgggtctcagaggtcatgctgcagcagacccaggttgccactgtgatcaactactataccggatggatgcagaagtggcctacactgcaggacctggccagtgcttccctggaggaggtgaatcaactctgggctggcctgggctactattctcgtggccggcggctgcaggagggagctcggaaggtggtagaggagctagggggccacatgccacgtacagcagagaccctgcagcagctcctgcctggcgtggggcgctacacagctggggccattgcctctatcgcctttggccaggcaaccggtgtggtggatggcaacgtagcacgggtgctgtgccgtgtccgagccattggtgctgatcccagcagcacccttgtttcccagcagctctggggtctagcccagcagctggtggacccagcccggccaggagatttcaaccaagcagccatggagctaggggccacagtgtgtaccccacagcgcccactgtgcagccagtgccctgtggagagcctgtgccgggcacgccagagagtggagcaggaacagctcttagcctcagggagcctgtcgggcagtcctgacgtggaggagtgtgctcccaacactggacagtgccacctgtgcctgcctccctcggagccctgggaccagaccctgggagtggtcaacttccccagaaaggccagccgcaagccccccagggaggagagctctgccacctgtgttctggaacagcctggggcccttggggcccaaattctgctggtgcagaggcccaactcaggtctgctggcaggactgtgggagttcccgtccgtgacctgggagccctcagagcagcttcagcgcaaggccctgctgcaggaactacagcgttgggctgggcccctcccagccacgcacctccggcaccttggggaggttgtccacaccttctctcacatcaagctgacatatcaagtatatgggctggccttggaagggcagaccccagtgaccaccgtaccaccaggtgctcgctggctgacgcaggaggaatttcacaccgcagctgtttccaccgccatgaaaaaggttttccgtgtgtatcagggccaacagccagggacctgtatgggttccaaaaggtcccaggtgtcctctccgtgcagtcggaaaaagccccgcatgggccagcaagtcctggataatttctttcggtctcacatctccactgatgcacacagcctcaacagtgcagcccagtgacacctctgaaagcccccattccctgagaatcctgttgttagtaaagtgcttatttttgtagttaaaaaaaaaaaaaaaaaa

SEQ ID NO: 503 - DNA, 1945 bp, Homo sapiens
cagccggagccgcggtgtacaacggaacttgtagtctcctcgtggctagttcaggcggaaggagcagtcctctgaagcttgaggagcctctagaactatgagcccgaggccttcccctctcccagagcgcagaggctttgaaggctacctctgggaagccgctcaccgtcggaagctgcgggagctgaaactgcgccatcgtcactgtcggcggccatgacaccgctcgtctcccgcctgagtcgtctgtgggccatcatgaggaagccacgagcagccgtgggaagtggtcacaggaagcaggcagccagccaggaagggaggcagaagcatgctaagaacaacagtcaggccaagccttctgcctgtgatgcctgtgcagggatgattgctgagtgtcctggggccccagcaggcctggccaggcagccggaagaggtggtattgcaggcctctgtctcctcataccatctattcagagacgtagctgaagtcacagccttccgagggagcctgctaagctggtacgaccaagagaaacgggacctaccatggagaagacgggcagaagatgagatggacctggacaggcgggcatatgctgtgtgggtctcagaggtcatgctgcagcagacccaggttgccactgtgatcaactactataccggatggatgcagaagtggcctacactgcaggacctggccagtgcttccctggaggaggtgaatcaactctgggctggcctgggctactattctcgtggccggcggctgcaggagggagctcggaaggtggtagaggagctagggggccacatgccacgtacagcagagaccctgcagcagctcctgcctggcgtggggcgctacacagctggggccattgcctctatcgcctttggccaggcaaccggtgtggtggatggcaacgtagcacgggtgctgtgccgtgtccgagccattggtgctgatcccagcagcacccttgtttcccagcagctctggggtctagcccagcagctggtggacccagcccggccaggagatttcaaccaagcagccatggagctaggggccacagtgtgtaccccacagcgcccactgtgcagccagtgccctgtggagagcctgtgccgggcacgccagagagtggagcaggaacagctcttagcctcagggagcctgtcgggcagtcctgacgtggaggagtgtgctcccaacactggacagtgccacctgtgcctgcctccctcggagccctgggaccagaccctgggagtggtcaacttccccagaaaggccagccgcaagccccccagggaggagagctctgccacctgtgttctggaacagcctggggcccttggggcccaaattctgctggtgcagaggcccaactcaggtctgctggcaggactgtgggagttcccgtccgtgacctgggagccctcagagcagcttcagcgcaaggccctgctgcaggaactacagcgttgggctgggcccctcccagccacgcacctccggcaccttggggaggttgtccacaccttctctcacatcaagctgacatatcaagtatatgggctggccttggaagggcagaccccagtgaccaccgtaccaccaggtgctcgctggctgacgcaggaggaatttcacaccgcagctgtttccaccgccatgaaaaaggttttccgtgtgtatcagggccaacagccagggacctgtatgggttccaaaaggtcccaggtgtcctctccgtgcagtcggaaaaagccccgcatgggccagcaagtcctggataatttctttcggtctcacatctccactgatgcacacagcctcaacagtgcagcccagtgacacctctgaaagcccccattccctgagaatcctgttgttagtaaagtgcttatttttgtagttaaaaaaaaaaaaaaaa

SEQ ID NO: 504 - DNA, 1710 bp, Homo sapiens
tctcgcggcgggaacgcggggcctccgtgttctgctgtcttcatcagcgtgggccgcgggccatcatgaggaagccacgagcagccgtgggaagtggtcacaggaagcaggcagccagccaggaagggaggcagaagcatgctaagaacaacagtcaggccaagccttctgcctgtgatggcctggccaggcagccggaagaggtggtattgcaggcctctgtctcctcataccatctattcagagacgtagctgaagtcacagccttccgagggagcctgctaagctggtacgaccaagagaaacgggacctaccatggagaagacgggcagaagatgagatggacctggacaggcgggcatatgctgtgtgggtctcagaggtcatgctgcagcagacccaggttgccactgtgatcaactactataccggatggatgcagaagtggcctacactgcaggacctggccagtgcttccctggaggaggtgaatcaactctgggctggcctgggctactattctcgtggccggcggctgcaggagggagctcggaaggtggtagaggagctagggggccacatgccacgtacagcagagaccctgcagcagctcctgcctggcgtggggcgctacacagctggggccattgcctctatcgcctttggccaggcaaccggtgtggtggatggcaacgtagcacgggtgctgtgccgtgtccgagccattggtgctgatcccagcagcacccttgtttcccagcagctctggggtctagcccagcagctggtggacccagcccggccaggagatttcaaccaagcagccatggagctaggggccacagtgtgtaccccacagcgcccactgtgcagccagtgccctgtggagagcctgtgccgggcacgccagagagtggagcaggaacagctcttagcctcagggagcctgtcgggcagtcctgacgtggaggagtgtgctcccaacactggacagtgccacctgtgcctgcctccctcggagccctgggaccagaccctgggagtggtcaacttccccagaaaggccagccgcaagccccccagggaggagagctctgccacctgtgttctggaacagcctggggcccttggggcccaaattctgctggtgcagaggcccaactcaggtctgctggcaggactgtgggagttcccgtccgtgacctgggagccctcagagcagcttcagcgcaaggccctgctgcaggaactacagcgttgggctgggcccctcccagccacgcacctccggcaccttggggaggttgtccacaccttctctcacatcaagctgacatatcaagtatatgggctggccttggaagggcagaccccagtgaccaccgtaccaccaggtgctcgctggctgacgcaggaggaatttcacaccgcagctgtttccaccgccatgaaaaaggttttccgtgtgtatcagggccaacagccagggacctgtatgggttccaaaaggtcccaggtgtcctctccgtgcagtcggaaaaagccccgcatgggccagcaagtcctggataatttctttcggtctcacatctccactgatgcacacagcctcaacagtgcagcccagtgacacctctgaaagcccccattccctgagaatcctgttgttagtaaagtgcttatttttgtagttaaaaaaaaaaaaaaaa

SEQ ID NO: 505 - DNA, 1794 bp, Homo sapiens
tcccgggtccggcgcggggaaggcagcctggcgcgcgctaattgcctattggcctgtgctgccggctcgcagcccgggtggacccgagccacgccccctggagtgcgccggaaagccgggcgcgctagagctcgcgggaggccatcatgaggaagccacgagcagccgtgggaagtggtcacaggaagcaggcagccagccaggaagggaggcagaagcatgctaagaacaacagtcaggccaagccttctgcctgtgatgcaggcctggccaggcagccggaagaggtggtattgcaggcctctgtctcctcataccatctattcagagacgtagctgaagtcacagccttccgagggagcctgctaagctggtacgaccaagagaaacgggacctaccatggagaagacgggcagaagatgagatggacctggacaggcgggcatatgctgtgtgggtctcagaggtcatgctgcagcagacccaggttgccactgtgatcaactactataccggatggatgcagaagtggcctacactgcaggacctggccagtgcttccctggaggaggtgaatcaactctgggctggcctgggctactattctcgtggccggcggctgcaggagggagctcggaaggtggtagaggagctagggggccacatgccacgtacagcagagaccctgcagcagctcctgcctggcgtggggcgctacacagctggggccattgcctctatcgcctttggccaggcaaccggtgtggtggatggcaacgtagcacgggtgctgtgccgtgtccgagccattggtgctgatcccagcagcacccttgtttcccagcagctctggggtctagcccagcagctggtggacccagcccggccaggagatttcaaccaagcagccatggagctaggggccacagtgtgtaccccacagcgcccactgtgcagccagtgccctgtggagagcctgtgccgggcacgccagagagtggagcaggaacagctcttagcctcagggagcctgtcgggcagtcctgacgtggaggagtgtgctcccaacactggacagtgccacctgtgcctgcctccctcggagccctgggaccagaccctgggagtggtcaacttccccagaaaggccagccgcaagccccccagggaggagagctctgccacctgtgttctggaacagcctggggcccttggggcccaaattctgctggtgcagaggcccaactcaggtctgctggcaggactgtgggagttcccgtccgtgacctgggagccctcagagcagcttcagcgcaaggccctgctgcaggaactacagcgttgggctgggcccctcccagccacgcacctccggcaccttggggaggttgtccacaccttctctcacatcaagctgacatatcaagtatatgggctggccttggaagggcagaccccagtgaccaccgtaccaccaggtgctcgctggctgacgcaggaggaatttcacaccgcagctgtttccaccgccatgaaaaaggttttccgtgtgtatcagggccaacagccagggacctgtatgggttccaaaaggtcccaggtgtcctctccgtgcagtcggaaaaagccccgcatgggccagcaagtcctggataatttctttcggtctcacatctccactgatgcacacagcctcaacagtgcagcccagtgacacctctgaaagcccccattccctgagaatcctgttgttagtaaagtgcttatttttgtagttaaaaaaaaaaaaaaaa

SEQ ID NO: 506 - DNA, 1791 bp, Homo sapiens
tcccgggtccggcgcggggaaggcagcctggcgcgcgctaattgcctattggcctgtgctgccggctcgcagcccgggtggacccgagccacgccccctggagtgcgccggaaagccgggcgcgctagagctcgcgggaggccatcatgaggaagccacgagcagccgtgggaagtggtcacaggaagcaggcagccagccaggaagggaggcagaagcatgctaagaacaacagtcaggccaagccttctgcctgtgatggcctggccaggcagccggaagaggtggtattgcaggcctctgtctcctcataccatctattcagagacgtagctgaagtcacagccttccgagggagcctgctaagctggtacgaccaagagaaacgggacctaccatggagaagacgggcagaagatgagatggacctggacaggcgggcatatgctgtgtgggtctcagaggtcatgctgcagcagacccaggttgccactgtgatcaactactataccggatggatgcagaagtggcctacactgcaggacctggccagtgcttccctggaggaggtgaatcaactctgggctggcctgggctactattctcgtggccggcggctgcaggagggagctcggaaggtggtagaggagctagggggccacatgccacgtacagcagagaccctgcagcagctcctgcctggcgtggggcgctacacagctggggccattgcctctatcgcctttggccaggcaaccggtgtggtggatggcaacgtagcacgggtgctgtgccgtgtccgagccattggtgctgatcccagcagcacccttgtttcccagcagctctggggtctagcccagcagctggtggacccagcccggccaggagatttcaaccaagcagccatggagctaggggccacagtgtgtaccccacagcgcccactgtgcagccagtgccctgtggagagcctgtgccgggcacgccagagagtggagcaggaacagctcttagcctcagggagcctgtcgggcagtcctgacgtggaggagtgtgctcccaacactggacagtgccacctgtgcctgcctccctcggagccctgggaccagaccctgggagtggtcaacttccccagaaaggccagccgcaagccccccagggaggagagctctgccacctgtgttctggaacagcctggggcccttggggcccaaattctgctggtgcagaggcccaactcaggtctgctggcaggactgtgggagttcccgtccgtgacctgggagccctcagagcagcttcagcgcaaggccctgctgcaggaactacagcgttgggctgggcccctcccagccacgcacctccggcaccttggggaggttgtccacaccttctctcacatcaagctgacatatcaagtatatgggctggccttggaagggcagaccccagtgaccaccgtaccaccaggtgctcgctggctgacgcaggaggaatttcacaccgcagctgtttccaccgccatgaaaaaggttttccgtgtgtatcagggccaacagccagggacctgtatgggttccaaaaggtcccaggtgtcctctccgtgcagtcggaaaaagccccgcatgggccagcaagtcctggataatttctttcggtctcacatctccactgatgcacacagcctcaacagtgcagcccagtgacacctctgaaagcccccattccctgagaatcctgttgttagtaaagtgcttatttttgtagttaaaaaaaaaaaaaaaa

SEQ ID NO: 507 - DNA, 1500 bp, Homo sapiens
tggggttgggtatgggggttgctgtggctaggagttagccttatgaaggacccaaaccacccaggtctgtgacccccccactccacagttgagggctggcactaaagagaaaagggcttatacttactggttcagcaaactcttcctgtccccaagcccactcagctcctgtgggtaggtaaagggagagttgtgacaggcctctagcaccagccccttcacaaccacctgccctccttgtttcccaactctcaccgtgtccacagccacgaaattagctgtctttatggctagcaggagggatggccacatctccttgaagttgttgctttgcacatccactacgggaacctggactactagctcctccccagatgttgtgcttttgctgacaccacctgggggttaggagggtgatggatgttcatgcttaaggaaagagcccaggggaacagacaccaagctaggccacggtgatggtggtaaggggggtagtttccattggtagcttttcccacaagcctttgtaacccacgtgttctacacacaggccttggagtggagaatgccctgaatttggggagaggaagcctgagtcttctactggcttgtatgagcctgggtaaattacttcccacctcgctttcacaatctgtagaggagaaagttggactagacgacctttgattcttttttcccatgtcctgcaggaaacattttgtagggcttgaggatctcagctcccttaatatcccacagggatccatactactgttctcatggtgccccagcgccacaagcaacagctcccagtaagccccagagcctggcagtgccccacaccagagctcccaatacgtcctaccttcctttggatcacaacgctcaatccactccactgaactgaatcacaactattactactaaccgttatgagctccagactacatctcccgccatgcctccatcagccccatgctcccaacgctccaggcttttgcagccggagccgcggtgtacaacggaacttgtagtctcctcgtggctagttcaggcggaaggagcagtcctctgaagcttgaggagcctctagaactatgagcccgaggccttcccctctcccagagcgcagaggctttgaaggctacctctgggaagccgctcaccgtcggaagctgcgggagctgaaactgcgccatcgtcactgtcggcggccatgacaccgctcgtctcccgcctgagtcgtctgtgggtacgctggacttgcggtccgtctcctggcgcggttcaggcagtcggggatggggcggggtctcgccgtcgggtcgccgatgggtcgaacttccgttcagacgtcccgggtccggcgcggggaaggcagcctggcgcgcgctaattgcctattggcctgtgctgccggctcgcagcccgggtggacccgagccacgccccctggagtgcgccggaaagccgggcgcgctagagctcgcgggaggtaat

SEQ ID NO: 508 - DNA, 1252 bp, Homo sapiens
attggtagcttttcccacaagcctttgtaacccacgtgttctacacacaggccttggagtggagaatgccctgaatttggggagaggaagcctgagtcttctactggcttgtatgagcctgggtaaattacttcccacctcgctttcacaatctgtagaggagaaagttggactagacgacctttgattcttttttcccatgtcctgcaggaaacattttgtagggcttgaggatctcagctcccttaatatcccacagggatccatactactgttctcatggtgccccagcgccacaagcaacagctcccagtaagccccagagcctggcagtgccccacaccagagctcccaatacgtcctaccttcctttggatcacaacgctcaatccactccactgaactgaatcacaactattactactaaccgttatgagctccagactacatctcccgccatgcctccatcagccccatgctcccaacgctccaggcttttgcagccggagccgcggtgtacaacggaacttgtagtctcctcgtggctagttcaggcggaaggagcagtcctctgaagcttgaggagcctctagaactatgagcccgaggccttcccctctcccagagcgcagaggctttgaaggctacctctgggaagccgctcaccgtcggaagctgcgggagctgaaactgcgccatcgtcactgtcggcggccatgacaccgctcgtctcccgcctgagtcgtctgtgggtacgctggacttgcggtccgtctcctggcgcggttcaggcagtcggggatggggcggggtctcgccgtcgggtcgccgatgggtcgaacttccgttcagacgtcccgggtccggcgcggggaaggcagcctggcgcgcgctaattgcctattggcctgtgctgccggctcgcagcccgggtggacccgagccacgccccctggagtgcgccggaaagccgggcgcgctagagctcgcgggaggtaatctttctctcctgctctcgcggcgggaacgcggggcctccgtgttctgctgtcttcatcagcgtgggccgcgggtagcgggtagtggggtggctgggtttgggctttccagagaaggtgacgctgcctgagctgagcttaaagcacgcccaggagttagactaggagagggtcgtgtgggggaaagaagggcgttctgggcatcggtaaattcccagagaggatggagagctcagtgatctccagaaagtgaa

SEQ ID NO: 509 - DNA, 1121 bp, Homo sapiens
tctcagacagatcttttgtccctctgatccttggtttcttctaggataaaatgaaggttttggacttaatgactactacaggctgtttcagtgtaaccatgctacatctctaagaggcagagaaaccgcctacccccattctcccagacacacctaaacaacccctatccacacacacagtcacagtaagcatcagagatacacaaatgctcccaaacaggaggctttcatccttgacccatcccagccctggcctcacagtctttgcatgtctccagggctgtaacgccggcccccttgaggccacttgctcagctatactagttgtatctcagtgctgcagccagccaagagtaaacccgtgagcatcttgagagtgcttgagagaagctggaccccatgtgaatggtggatgagagggagatagctatcacccttggaaggcctcaaaatttggcctcattgtgactgactgctttggctgggtctttttgtttcaggccatcatgaggaagccacgagcagccgtgggaagtggtcacaggaagcaggcagccagccaggaagggaggcagaagcatgctaagaacaacagtcaggccaagccttctgcctgtgatggtaaggaactaggttgtggcccaaggctcattggccatgaaaggcagattcaggctgggaagggattgtgatacgtatcaagacattaagagacttactaagggccaggtgcggtggctcacacctgtaatcccagcactttgggaggccgaggcaggtggatcccttgagcccaggagtttgagaccagcttgggtaacatggcgaaatcccctctctatgctcgcgtggtggtgagcgtctgtagtcccagctactcgggaagctgaggtgacaggatcgcttgagcctggaaggcagaagttgcactgagtcaagataatgcaactgcatttcagtctgggcaacagagccagactcttgtctcaaaacaaaagagactcactgagggtgtaattctgactgtattgctgtgtgacattgggacaattgctctgaatggctgctttcttaccagtaaaatggagcagtagttcagcatttcctccctcatgtggctt

SEQ ID NO: 510 - DNA, 1191 bp, Homo sapiens
gcctggaaggcagaagttgcactgagtcaagataatgcaactgcatttcagtctgggcaacagagccagactcttgtctcaaaacaaaagagactcactgagggtgtaattctgactgtattgctgtgtgacattgggacaattgctctgaatggctgctttcttaccagtaaaatggagcagtagttcagcatttcctccctcatgtggctttcatgggaccaaatgagtttatgagcctgaaagtgttttgtgaataggaaggtcctgcaccagtatacattctagctggctaaaactattaggttttcattatggctcagagacaagccagtagtaccaccctgagaaaattaaggccagaaacttagccacagctacacacaattacataactctggtctgactccagctccaaagcttaagggggttagttgggggaagccctaagtgggagcatactgccacaggctgctgtgtcccaagaccctgatgcacagcctgtgcagggatgattgctgagtgtcctggggccccagcaggcctggccaggcagccggaagaggtggtattgcaggcctctgtctcctcataccatctattcagagacgtagctgaagtcacagccttccgagggagcctgctaagctggtacgaccaagagaaacgggacctaccatggagaagacgggtaggcaggcgaggagcagggacagtgggtgggaggcaggcacccagccccctccaccctaactcctcatctggggttgcattgacaggcagaagatgagatggacctggacaggcgggcatatgctggtcagtacatctcctgagagcagggccactttgcctcgaggcccttgggtctgggggctgtgggccaggtaggggcaggtcagcagtgtcctcatgccaacccctttcccccagtgtgggtctcagaggtcatgctgcagcagacccaggttgccactgtgatcaactactataccggatggatgcaggtgactccaggggaggaagggaagggtcatgggtcagaccccagatgagagcctctactttggggtgggtgtagagaaggcttcctctaccaccttcacccttgaccttgtctctttctgcctgcctgtggctatagaagtggcctacactgcaggacctggccagtgcttccctggaggtgag

SEQ ID NO: 511 - DNA, 1040 bp, Homo sapiens
acattctagctggctaaaactattaggttttcattatggctcagagacaagccagtagtaccaccctgagaaaattaaggccagaaacttagccacagctacacacaattacataactctggtctgactccagctccaaagcttaagggggttagttgggggaagccctaagtgggagcatactgccacaggctgctgtgtcccaagaccctgatgcacagcctgtgcagggatgattgctgagtgtcctggggccccagcaggcctggccaggcagccggaagaggtggtattgcaggcctctgtctcctcataccatctattcagagacgtagctgaagtcacagccttccgagggagcctgctaagctggtacgaccaagagaaacgggacctaccatggagaagacgggtaggcaggcgaggagcagggacagtgggtgggaggcaggcacccagccccctccaccctaactcctcatctggggttgcattgacaggcagaagatgagatggacctggacaggcgggcatatgctggtcagtacatctcctgagagcagggccactttgcctcgaggcccttgggtctgggggctgtgggccaggtaggggcaggtcagcagtgtcctcatgccaacccctttcccccagtgtgggtctcagaggtcatgctgcagcagacccaggttgccactgtgatcaactactataccggatggatgcaggtgactccaggggaggaagggaagggtcatgggtcagaccccagatgagagcctctactttggggtgggtgtagagaaggcttcctctaccaccttcacccttgaccttgtctctttctgcctgcctgtggctatagaagtggcctacactgcaggacctggccagtgcttccctggaggtgagagccaccctagggtaggggaaataggaacaatagagggactgacgggtgatctctttgacctctgatcctacccacaggaggtgaatcaactctgggctggcctgggctactattctcgtggccggcg

SEQ ID NO: 512 - DNA, 1074 bp, Homo sapiens
gttgggggaagccctaagtgggagcatactgccacaggctgctgtgtcccaagaccctgatgcacagcctgtgcagggatgattgctgagtgtcctggggccccagcaggcctggccaggcagccggaagaggtggtattgcaggcctctgtctcctcataccatctattcagagacgtagctgaagtcacagccttccgagggagcctgctaagctggtacgaccaagagaaacgggacctaccatggagaagacgggtaggcaggcgaggagcagggacagtgggtgggaggcaggcacccagccccctccaccctaactcctcatctggggttgcattgacaggcagaagatgagatggacctggacaggcgggcatatgctggtcagtacatctcctgagagcagggccactttgcctcgaggcccttgggtctgggggctgtgggccaggtaggggcaggtcagcagtgtcctcatgccaacccctttcccccagtgtgggtctcagaggtcatgctgcagcagacccaggttgccactgtgatcaactactataccggatggatgcaggtgactccaggggaggaagggaagggtcatgggtcagaccccagatgagagcctctactttggggtgggtgtagagaaggcttcctctaccaccttcacccttgaccttgtctctttctgcctgcctgtggctatagaagtggcctacactgcaggacctggccagtgcttccctggaggtgagagccaccctagggtaggggaaataggaacaatagagggactgacgggtgatctctttgacctctgatcctacccacaggaggtgaatcaactctgggctggcctgggctactattctcgtggccggcggctgcaggagggagctcggaaggtaaggggatggcaggagggtaggaacccaggagtcttgggtgtcttataatcttgagtcttgcactccaatcaggtggtagaggagctagggggccacatgccacgtacagcagagaccctgcagcagctcctgcctggcgtggggcgctacacagctggggcca

SEQ ID NO: 513 - DNA, 1042 bp, Homo sapiens
taagctggtacgaccaagagaaacgggacctaccatggagaagacgggtaggcaggcgaggagcagggacagtgggtgggaggcaggcacccagccccctccaccctaactcctcatctggggttgcattgacaggcagaagatgagatggacctggacaggcgggcatatgctggtcagtacatctcctgagagcagggccactttgcctcgaggcccttgggtctgggggctgtgggccaggtaggggcaggtcagcagtgtcctcatgccaacccctttcccccagtgtgggtctcagaggtcatgctgcagcagacccaggttgccactgtgatcaactactataccggatggatgcaggtgactccaggggaggaagggaagggtcatgggtcagaccccagatgagagcctctactttggggtgggtgtagagaaggcttcctctaccaccttcacccttgaccttgtctctttctgcctgcctgtggctatagaagtggcctacactgcaggacctggccagtgcttccctggaggtgagagccaccctagggtaggggaaataggaacaatagagggactgacgggtgatctctttgacctctgatcctacccacaggaggtgaatcaactctgggctggcctgggctactattctcgtggccggcggctgcaggagggagctcggaaggtaaggggatggcaggagggtaggaacccaggagtcttgggtgtcttataatcttgagtcttgcactccaatcaggtggtagaggagctagggggccacatgccacgtacagcagagaccctgcagcagctcctgcctggcgtggggcgctacacagctggggccattgcctctatcgcctttggccaggtgatctcacagcccacccccactttgtgcgtgcccagcctccttcctcccagcccaggctaactctttggcccctctgtgccaggcaaccggtgtggtggatggcaacgtagcacgggtgctgtgccgtgtccgagccattggtgctgatcccag

SEQ ID NO: 514 - DNA, 1072 bp, Homo sapiens
gcattgacaggcagaagatgagatggacctggacaggcgggcatatgctggtcagtacatctcctgagagcagggccactttgcctcgaggcccttgggtctgggggctgtgggccaggtaggggcaggtcagcagtgtcctcatgccaacccctttcccccagtgtgggtctcagaggtcatgctgcagcagacccaggttgccactgtgatcaactactataccggatggatgcaggtgactccaggggaggaagggaagggtcatgggtcagaccccagatgagagcctctactttggggtgggtgtagagaaggcttcctctaccaccttcacccttgaccttgtctctttctgcctgcctgtggctatagaagtggcctacactgcaggacctggccagtgcttccctggaggtgagagccaccctagggtaggggaaataggaacaatagagggactgacgggtgatctctttgacctctgatcctacccacaggaggtgaatcaactctgggctggcctgggctactattctcgtggccggcggctgcaggagggagctcggaaggtaaggggatggcaggagggtaggaacccaggagtcttgggtgtcttataatcttgagtcttgcactccaatcaggtggtagaggagctagggggccacatgccacgtacagcagagaccctgcagcagctcctgcctggcgtggggcgctacacagctggggccattgcctctatcgcctttggccaggtgatctcacagcccacccccactttgtgcgtgcccagcctccttcctcccagcccaggctaactctttggcccctctgtgccaggcaaccggtgtggtggatggcaacgtagcacgggtgctgtgccgtgtccgagccattggtgctgatcccagcagcacccttgtttcccagcagctctggtaggatgttggggtaacaagggtgcttcaggggtgtctgcaaaggagctctgcttcacagcagtgttcccttcttttaggggtctagcccagcagctggtggacccagcccggccaggagatttcaa

SEQ ID NO: 515 - DNA, 1114 bp, Homo sapiens
caacccctttcccccagtgtgggtctcagaggtcatgctgcagcagacccaggttgccactgtgatcaactactataccggatggatgcaggtgactccaggggaggaagggaagggtcatgggtcagaccccagatgagagcctctactttggggtgggtgtagagaaggcttcctctaccaccttcacccttgaccttgtctctttctgcctgcctgtggctatagaagtggcctacactgcaggacctggccagtgcttccctggaggtgagagccaccctagggtaggggaaataggaacaatagagggactgacgggtgatctctttgacctctgatcctacccacaggaggtgaatcaactctgggctggcctgggctactattctcgtggccggcggctgcaggagggagctcggaaggtaaggggatggcaggagggtaggaacccaggagtcttgggtgtcttataatcttgagtcttgcactccaatcaggtggtagaggagctagggggccacatgccacgtacagcagagaccctgcagcagctcctgcctggcgtggggcgctacacagctggggccattgcctctatcgcctttggccaggtgatctcacagcccacccccactttgtgcgtgcccagcctccttcctcccagcccaggctaactctttggcccctctgtgccaggcaaccggtgtggtggatggcaacgtagcacgggtgctgtgccgtgtccgagccattggtgctgatcccagcagcacccttgtttcccagcagctctggtaggatgttggggtaacaagggtgcttcaggggtgtctgcaaaggagctctgcttcacagcagtgttcccttcttttaggggtctagcccagcagctggtggacccagcccggccaggagatttcaaccaagcagccatggagctaggggccacagtgtgtaccccacagcgcccactgtgcagccagtgccctgtggagagcctgtgccgggcacgccagagagtaagcctactggggaaggggcagtgagaagtcctaaggagtgactctgccctatgacactcaaccctgtgcctctcaggtggagcaggaac

SEQ ID NO: 516 - DNA, 1098 bp, Homo sapiens
tgtctctttctgcctgcctgtggctatagaagtggcctacactgcaggacctggccagtgcttccctggaggtgagagccaccctagggtaggggaaataggaacaatagagggactgacgggtgatctctttgacctctgatcctacccacaggaggtgaatcaactctgggctggcctgggctactattctcgtggccggcggctgcaggagggagctcggaaggtaaggggatggcaggagggtaggaacccaggagtcttgggtgtcttataatcttgagtcttgcactccaatcaggtggtagaggagctagggggccacatgccacgtacagcagagaccctgcagcagctcctgcctggcgtggggcgctacacagctggggccattgcctctatcgcctttggccaggtgatctcacagcccacccccactttgtgcgtgcccagcctccttcctcccagcccaggctaactctttggcccctctgtgccaggcaaccggtgtggtggatggcaacgtagcacgggtgctgtgccgtgtccgagccattggtgctgatcccagcagcacccttgtttcccagcagctctggtaggatgttggggtaacaagggtgcttcaggggtgtctgcaaaggagctctgcttcacagcagtgttcccttcttttaggggtctagcccagcagctggtggacccagcccggccaggagatttcaaccaagcagccatggagctaggggccacagtgtgtaccccacagcgcccactgtgcagccagtgccctgtggagagcctgtgccgggcacgccagagagtaagcctactggggaaggggcagtgagaagtcctaaggagtgactctgccctatgacactcaaccctgtgcctctcaggtggagcaggaacagctcttagcctcagggagcctgtcgggcagtcctgacgtggaggagtgtggtgagcaccaaacctagcccccaccccaacccttcctggcccagtcagaagccccattccagttcttcctctaacctgagtaagattctgcagaacccggccaaagcccactctctaggttggcccctaaag

SEQ ID NO: 517 - DNA, 1145 bp, Homo sapiens
ctgggctactattctcgtggccggcggctgcaggagggagctcggaaggtaaggggatggcaggagggtaggaacccaggagtcttgggtgtcttataatcttgagtcttgcactccaatcaggtggtagaggagctagggggccacatgccacgtacagcagagaccctgcagcagctcctgcctggcgtggggcgctacacagctggggccattgcctctatcgcctttggccaggtgatctcacagcccacccccactttgtgcgtgcccagcctccttcctcccagcccaggctaactctttggcccctctgtgccaggcaaccggtgtggtggatggcaacgtagcacgggtgctgtgccgtgtccgagccattggtgctgatcccagcagcacccttgtttcccagcagctctggtaggatgttggggtaacaagggtgcttcaggggtgtctgcaaaggagctctgcttcacagcagtgttcccttcttttaggggtctagcccagcagctggtggacccagcccggccaggagatttcaaccaagcagccatggagctaggggccacagtgtgtaccccacagcgcccactgtgcagccagtgccctgtggagagcctgtgccgggcacgccagagagtaagcctactggggaaggggcagtgagaagtcctaaggagtgactctgccctatgacactcaaccctgtgcctctcaggtggagcaggaacagctcttagcctcagggagcctgtcgggcagtcctgacgtggaggagtgtggtgagcaccaaacctagcccccaccccaacccttcctggcccagtcagaagccccattccagttcttcctctaacctgagtaagattctgcagaacccggccaaagcccactctctaggttggcccctaaagccctcttggcttgagtagggttcggggatctccgttcccagctcccaacactggacagtgccacctgtgcctgcctccctcggagccctgggaccagaccctgggagtggtcaacttccccagaaaggccagccgcaagccccccagggaggagagctctgccacctgtgttctggaacagcctggggcccttggggcccaaattctgctggtgcagaggcccaa

SEQ ID NO: 518 - DNA, 1064 bp, Homo sapiens
cgcctttggccaggtgatctcacagcccacccccactttgtgcgtgcccagcctccttcctcccagcccaggctaactctttggcccctctgtgccaggcaaccggtgtggtggatggcaacgtagcacgggtgctgtgccgtgtccgagccattggtgctgatcccagcagcacccttgtttcccagcagctctggtaggatgttggggtaacaagggtgcttcaggggtgtctgcaaaggagctctgcttcacagcagtgttcccttcttttaggggtctagcccagcagctggtggacccagcccggccaggagatttcaaccaagcagccatggagctaggggccacagtgtgtaccccacagcgcccactgtgcagccagtgccctgtggagagcctgtgccgggcacgccagagagtaagcctactggggaaggggcagtgagaagtcctaaggagtgactctgccctatgacactcaaccctgtgcctctcaggtggagcaggaacagctcttagcctcagggagcctgtcgggcagtcctgacgtggaggagtgtggtgagcaccaaacctagcccccaccccaacccttcctggcccagtcagaagccccattccagttcttcctctaacctgagtaagattctgcagaacccggccaaagcccactctctaggttggcccctaaagccctcttggcttgagtagggttcggggatctccgttcccagctcccaacactggacagtgccacctgtgcctgcctccctcggagccctgggaccagaccctgggagtggtcaacttccccagaaaggccagccgcaagccccccagggaggagagctctgccacctgtgttctggaacagcctggggcccttggggcccaaattctgctggtgcagaggcccaactcaggtacctggatactgggcgtggagggcagtggcatgagtaacaagagagaatggagggaatcggcagctgaggcctgacccctgcctggctgccctccctctcaggtctgctggcaggactgtgggagttcccgtccgt

SEQ ID NO: 519 - DNA, 1189 bp, Homo sapiens
aaaggagctctgcttcacagcagtgttcccttcttttaggggtctagcccagcagctggtggacccagcccggccaggagatttcaaccaagcagccatggagctaggggccacagtgtgtaccccacagcgcccactgtgcagccagtgccctgtggagagcctgtgccgggcacgccagagagtaagcctactggggaaggggcagtgagaagtcctaaggagtgactctgccctatgacactcaaccctgtgcctctcaggtggagcaggaacagctcttagcctcagggagcctgtcgggcagtcctgacgtggaggagtgtggtgagcaccaaacctagcccccaccccaacccttcctggcccagtcagaagccccattccagttcttcctctaacctgagtaagattctgcagaacccggccaaagcccactctctaggttggcccctaaagccctcttggcttgagtagggttcggggatctccgttcccagctcccaacactggacagtgccacctgtgcctgcctccctcggagccctgggaccagaccctgggagtggtcaacttccccagaaaggccagccgcaagccccccagggaggagagctctgccacctgtgttctggaacagcctggggcccttggggcccaaattctgctggtgcagaggcccaactcaggtacctggatactgggcgtggagggcagtggcatgagtaacaagagagaatggagggaatcggcagctgaggcctgacccctgcctggctgccctccctctcaggtctgctggcaggactgtgggagttcccgtccgtgacctgggagccctcagagcagcttcagcgcaaggccctgctgcaggaactacagcgttgggctgggcccctcccagccacgcacctccggcaccttggggaggtaagtgagcagcggaatagccaaggatgttggcttttgaggctatatccacaggcctatttgaaccccttgacccttcctccaggttgtccacaccttctctcacatcaagctgacatatcaagtatatgggctggccttggaagggcagaccccagtgaccaccgtaccaccaggtgctcgctggctgacgcaggaggaatttcacaccgcagctgtttccaccgccatgaaaaaggcactacctttgttgtctttg

SEQ ID NO: 520 - DNA, 1137 bp, Homo sapiens
agcctgtcgggcagtcctgacgtggaggagtgtggtgagcaccaaacctagcccccaccccaacccttcctggcccagtcagaagccccattccagttcttcctctaacctgagtaagattctgcagaacccggccaaagcccactctctaggttggcccctaaagccctcttggcttgagtagggttcggggatctccgttcccagctcccaacactggacagtgccacctgtgcctgcctccctcggagccctgggaccagaccctgggagtggtcaacttccccagaaaggccagccgcaagccccccagggaggagagctctgccacctgtgttctggaacagcctggggcccttggggcccaaattctgctggtgcagaggcccaactcaggtacctggatactgggcgtggagggcagtggcatgagtaacaagagagaatggagggaatcggcagctgaggcctgacccctgcctggctgccctccctctcaggtctgctggcaggactgtgggagttcccgtccgtgacctgggagccctcagagcagcttcagcgcaaggccctgctgcaggaactacagcgttgggctgggcccctcccagccacgcacctccggcaccttggggaggtaagtgagcagcggaatagccaaggatgttggcttttgaggctatatccacaggcctatttgaaccccttgacccttcctccaggttgtccacaccttctctcacatcaagctgacatatcaagtatatgggctggccttggaagggcagaccccagtgaccaccgtaccaccaggtgctcgctggctgacgcaggaggaatttcacaccgcagctgtttccaccgccatgaaaaaggcactacctttgttgtctttgttgtacttccttgtgtttcctacatgttctacatgaatatattactgtgtaaacaggaaaaaaagcatttttttttgagacggagaatcgctctgttgcccaggctggagtgcaatggcgctatctcggttgactgcaacctccatctcccgggttcaagtgattctcctgcctcagcttcctgagtagctcggattacaggcgcccgccaccatgcctggctaatttttgtatttttagt

SEQ ID NO: 521 - DNA, 1153 bp, Homo sapiens
agtgccacctgtgcctgcctccctcggagccctgggaccagaccctgggagtggtcaacttccccagaaaggccagccgcaagccccccagggaggagagctctgccacctgtgttctggaacagcctggggcccttggggcccaaattctgctggtgcagaggcccaactcaggtacctggatactgggcgtggagggcagtggcatgagtaacaagagagaatggagggaatcggcagctgaggcctgacccctgcctggctgccctccctctcaggtctgctggcaggactgtgggagttcccgtccgtgacctgggagccctcagagcagcttcagcgcaaggccctgctgcaggaactacagcgttgggctgggcccctcccagccacgcacctccggcaccttggggaggtaagtgagcagcggaatagccaaggatgttggcttttgaggctatatccacaggcctatttgaaccccttgacccttcctccaggttgtccacaccttctctcacatcaagctgacatatcaagtatatgggctggccttggaagggcagaccccagtgaccaccgtaccaccaggtgctcgctggctgacgcaggaggaatttcacaccgcagctgtttccaccgccatgaaaaaggcactacctttgttgtctttgttgtacttccttgtgtttcctacatgttctacatgaatatattactgtgtaaacaggaaaaaaagcatttttttttgagacggagaatcgctctgttgcccaggctggagtgcaatggcgctatctcggttgactgcaacctccatctcccgggttcaagtgattctcctgcctcagcttcctgagtagctcggattacaggcgcccgccaccatgcctggctaatttttgtatttttagtagagatgaggtttcaccatgctggccaggctggtctccaactcttgacctcaagtgatccgcccgcctcagcctcccagaatgctgggattacaggtgtgagctaccacacccagccatgattttttgtatttttagagatggggtttcaccatgttggccaggctggtctcaaactcctggcctcaagtgatccacccgacttggcctcccaaaatgctgggattataggcgtgagc

SEQ ID NO: 522 - DNA, 1042 bp, Homo sapiens
gctggagtgcaatggcgctatctcggttgactgcaacctccatctcccgggttcaagtgattctcctgcctcagcttcctgagtagctcggattacaggcgcccgccaccatgcctggctaatttttgtatttttagtagagatgaggtttcaccatgctggccaggctggtctccaactcttgacctcaagtgatccgcccgcctcagcctcccagaatgctgggattacaggtgtgagctaccacacccagccatgattttttgtatttttagagatggggtttcaccatgttggccaggctggtctcaaactcctggcctcaagtgatccacccgacttggcctcccaaaatgctgggattataggcgtgagccaccatgcctggccaaaaaagcatattttaaacaaaagtactgggacatgaagttaagggcagaacaccggtttatctcttttgcaaaaagtgccagccctcacctccctgtcttcttgtctaggttttccgtgtgtatcagggccaacagccagggacctgtatggtaagtctcctaggcctctcccaaccgtgtctccccaggcctgagtccataggtttttagtcagttaactaacgaatgtctgggtgaacattctccactccaggcttcactggagggaggaatagttcttgacctggagaccttccattgtggggtgcagggtagagggaaaggaaaaaaatgatgaggactctccagtgtcacaggtgtgtgaaatgcctgtactgagttttgtgggatatgaattgtggagccatcagttcttttttttttttttttttttttttgagacagtctcactgtcacccaagctagagtgcagtggcccgatctcggctcactgcaatctcccacaactggattaaagcgattctcctgcctcagtctcccaagtagctgggattacaggtgcctgctaccacacccaactaatttttgtatttttagtagagacagggtttcaccatgttgactaggctggtctcgaactcctgacctca

SEQ ID NO: 523 - DNA, 1196 bp, Homo sapiens
gttctaattgggagacggatcaggaaaggctgtttggaggaagcagctggtaatcttcgtcctagaaatgaatccttttcttcaggtttgggaggggaatcaaccgtagcgatgttctttccagtcccaagagtagtgtgagcaaaggtggagcccagtgcaggctgcagtgctcaaggagctgtgagcagttggtttagctggaaaggtcagcagggcctgctgggtcagtcagggtgtgagccctaggctgctgactcattttaggtggaggagagaggagtcagatttgcatttttaggacaattcgattccctcaggcagccttttggagggttgattgatggggcagatacttgaggcaggatgaaagctctacagcattccaggctaagcctagctagatcagtagagtcggggaaagggagagaggacaaggagaggattctctgctccccctcccccaactacaaggcctccctccttccattttttcacagggttccaaaaggtcccaggtgtcctctccgtgcagtcggaaaaagccccgcatgggccagcaagtcctggataatttctttcggtctcacatctccactgatgcacacagcctcaacagtgcagcccagtgacacctctgaaagcccccattccctgagaatcctgttgttagtaaagtgcttatttttgtagttattttatgttgtatttttttgagatgggggtctcgctatgttgctcagactggtttcgaactcaggtgattctggcctcaagtgattctcccacttcagcctcctaaagtgcttggattacaggcatgagccaccacgcccgcccttttgtagctattttggacagccttccaccctctccctagccccctcaccccttatatctgagggagggacccagaaaagtggtgacgttctgcttggttctgactttctctggctgaactcccagccagccccgggcagatggggttggagtgggggtgttctgtccagactgatctgccctccaacccccaggagaaaggcaaggcagctacagggagaacctgccagtggctgacacacaacaccctctgtttacgtctcaggtcagctctaattggagtggtggcatcactctggagtaggtagttgggctcaactctcacccagcccctccccacctgagtggtcgctccc

SEQ ID NO: 524 - DNA, 1500 bp, Homo sapiens
ttagctggaaaggtcagcagggcctgctgggtcagtcagggtgtgagccctaggctgctgactcattttaggtggaggagagaggagtcagatttgcatttttaggacaattcgattccctcaggcagccttttggagggttgattgatggggcagatacttgaggcaggatgaaagctctacagcattccaggctaagcctagctagatcagtagagtcggggaaagggagagaggacaaggagaggattctctgctccccctcccccaactacaaggcctccctccttccattttttcacagggttccaaaaggtcccaggtgtcctctccgtgcagtcggaaaaagccccgcatgggccagcaagtcctggataatttctttcggtctcacatctccactgatgcacacagcctcaacagtgcagcccagtgacacctctgaaagcccccattccctgagaatcctgttgttagtaaagtgcttatttttgtagttattttatgttgtatttttttgagatgggggtctcgctatgttgctcagactggtttcgaactcaggtgattctggcctcaagtgattctcccacttcagcctcctaaagtgcttggattacaggcatgagccaccacgcccgcccttttgtagctattttggacagccttccaccctctccctagccccctcaccccttatatctgagggagggacccagaaaagtggtgacgttctgcttggttctgactttctctggctgaactcccagccagccccgggcagatggggttggagtgggggtgttctgtccagactgatctgccctccaacccccaggagaaaggcaaggcagctacagggagaacctgccagtggctgacacacaacaccctctgtttacgtctcaggtcagctctaattggagtggtggcatcactctggagtaggtagttgggctcaactctcacccagcccctccccacctgagtggtcgctccctagggggagaggaagcacaggagaagatttgttctgttttaaattcctacctcaaatacgaaataatttatttagggttatgttacatacggagtgaaacaatacagaaaagcaaagggctaataatgacaggatttgaggagtgggtgggaggaaatagaatcacagcgggacacagggaggactcgaaagtattggttatgttctatttcctagtgtgtaattcttttattgttctttgtatcttacatatttattatagactgtatataagaaatgttttagttttaaaaaatcccacctctttggagcccaatgagagacacagcttctggcaggcactgatgaaatggaagtcacacctgccccccggaggcaaagcctttcactagttgggcctcctgcagatgttcctcagttctgtgctggtctccccagagctgcaggacagctggctgcacccagccctgggcatccttaggcttcctggctcctggcag

SEQ ID NO: 525 - DNA, 4622 bp, Homo sapiens
gagcgcgcacgtcccggagcccatgccgaccgcaggcgccgtatccgcgctcgtctagcagccccggttacgcggttgcacgtcggccccagccctgaggagccggaccgatgtggaaactgctgcccgccgcgggcccggcaggaggagaaccatacagacttttgactggcgttgagtacgttgttggaaggaaaaactgtgccattctgattgaaaatgatcagtcgatcagccgaaatcatgctgtgttaactgctaacttttctgtaaccaacctgagtcaaacagatgaaatccctgtattgacattaaaagataattctaagtatggtacctttgttaatgaggaaaaaatgcagaatggcttttcccgaactttgaagtcgggggatggtattacttttggagtgtttggaagtaaattcagaatagagtatgagcctttggttgcatgctcttcttgtttagatgtctctgggaaaactgctttaaatcaagctatattgcaacttggaggatttactgtaaacaattggacagaagaatgcactcaccttgtcatggtatcagtgaaagttaccattaaaacaatatgtgcactcatttgtggacgtccaattgtaaagccagaatattttactgaattcctgaaagcagttgagtccaagaagcagcctccacaaattgaaagtttttacccacctcttgatgaaccatctattggaagtaaaaatgttgatctgtcaggacggcaggaaagaaaacaaatcttcaaagggaaaacatttatatttttgaatgccaaacagcataagaaattgagttccgcagttgtctttggaggtggggaagctaggttgataacagaagagaatgaagaagaacataatttctttttggctccgggaacgtgtgttgttgatacaggaataacaaactcacagaccttaattcctgactgtcagaagaaatggattcagtcaataatggatatgctccaaaggcaaggtcttagacctattcctgaagcagaaattggattggcggtgattttcatgactacaaagaattactgtgatcctcagggccatcccagtacaggattaaagacaacaactccaggaccaagcctttcacaaggcgtgtcagttgatgaaaaactaatgccaagcgccccagtgaacactacaacatacgtagctgacacagaatcagagcaagcagatacatgggatttgagtgaaaggccaaaagaaatcaaagtctccaaaatggaacaaaaattcagaatgctttcacaagatgcacccactgtaaaggagtcctgcaaaacaagctctaataataatagtatggtatcaaatactttggctaagatgagaatcccaaactatcagctttcaccaactaaattgccaagtataaataaaagtaaagatagggcttctcagcagcagcagaccaactccatcagaaactactttcagccgtctaccaaaaaaagggaaagggatgaagaaaatcaagaaatgtcttcatgcaaatcagcaagaatagaaacgtcttgttctcttttagaacaaacacaacctgctacaccctcattgtggaaaaataaggagcagcatctatctgagaatgagcctgtggacacaaactcagacaataacttatttacagatacagatttaaaatctattgtgaaaaattctgccagtaaatctcatgctgcagaaaagctaagatcaaataaaaaaagggaaatggatgatgtggccatagaagatgaagtattggaacagttattcaaggacacaaaaccagagttagaaattgatgtgaaagttcaaaaacaggaggaagatgtcaatgttagaaaaaggccaaggatggatatagaaacaaatgacactttcagtgatgaagcagtaccagaaagtagcaaaatatctcaagaaaatgaaattgggaagaaacgtgaactcaaggaagactcactatggtcagctaaagaaatatctaacaatgacaaacttcaggatgatagtgagatgcttccaaaaaagctgttattgactgaatttagatcactggtgattaaaaactctacttccagaaatccatctggcataaatgatgattatggtcaactaaaaaatttcaagaaattcaaaaaggtcacatatcctggagcaggaaaacttccacacatcattggaggatcagatctaatagctcatcatgctcgaaagaatacagaactagaagagtggctaaggcaggaaatggaggtacaaaatcaacatgcaaaagaagagtctcttgctgatgatctttttagatacaatccttatttaaaaaggagaagataactgaggattttaaaaagaagccatggaaaaacttcctagtaagcatctacttcaggccaacaaggttatatgaatatatagtgtatagaagcgatttaagttacaatgttttatggcctaaatttattaaataaaatgcacaaaactttgattcttttgtatgtaacaattgtttgttctgttttcaggctttgtcattgcatctttttttcatttttaaatgtgttttgtttattaaatagttaatatagtcacagttcaaaattctaaatgtacgtaaggtaaagactaaagtcacccttccaccattgtcctagctacttggttcccctcagaaaaaaattcatgatactcatttcttatgaatctttccagggatttttgagtcctattcaaattcctatttttaaataatttcctacacaaatgatagcataacatatgcagtgttctacaccttgcttttttacttagtagattaaaaattataggaatatcaatataatgtttttaatattttttcttttccattatgctgtagtcttacctaaactctggtgatccaaacaaaatggcttcagtggtgcagatgtcacctacatgttattctagtactagaaactgaagaccatgtggagacttcatcaaacatgggtttagttttcaccagaatggaaagacctgtacccctttttggtggtcttactgagctgggtgggtgtctgttttgagcttatttagagtcctagttttcctacttataaagtagaaatggtgagattgttttctttttctaccttaaagggagatggtaagaaacaatgaatgtcttttttcaaactttattgacaagtgattttcaagtctgtgttcaaaaatatattcatgtacctgtgatccagcaagaagggagttccagtcaagagtcactacaactgattagttgtttagagaatgagaaatggaacagtgaggaatggaggccatatttccatgacttcccttgtaaacagaagcaacagaagggacaagaggctggcctctacatcactctcaccttccaaatcttgtggaagtgcatctacttgccagaaccaaattaacttacttccaagttctggctgcttgcaggtggaactccagctgcaagggagttagggaaatgaaggtctttttttaaaagcttctcagccttcctagggaacagaaattgggtgagccaatctgcaatttctactacaggcattgagaccagttagattattgaaatattatagagagttatgaacacttaaattatgatagtggtatgacattggatagaacatgggatactttagaagtagaattgacagggcatattagttgatgaaatggagtcatttgagtctcttaatagccatgtatcataattaccaagtgaagctggtggaacatatggtctccattttacagttaaggaatataatggacagattaatattgttctctgtcatgcccacaatccctttctaaggaagactgccctactatagcagtttttatatttgtcaatttatgaatataatgaatgagagttctggtacctcctgtctttacaaatattggtgttgtcagtatttttcctttttaaccattccaatcggtgtgtagtgatgtttcattttggttttaatttgtatatccctgatagctataattgggtcatagaaattctttatacattctagatgcaagtctcttgtcggatatatgtattgagatattacacctagtctgtggcttgactgttttctttatgtcttttgatgaatagaagttttaaattttgacaaggtcaaatttatttttttcttttgtttgatattttttctctccaatttaaccccaagatttcagatattctgctctattatataaactttatatttttatatttgtgatctaccttgaattgatatgtatgttgtgaattatggatcagggttctttttttcccccatacaagtatccagtcattgtaacactgtttattgaaagaattatcctttcctcattaaattaccttgccaattagtaaaaaatcaattaaccataatggtggatctgtttctggactttctgtttggttacactgaaatgtttgtccatccttgcactcactcataccatactgccttgaattactgtagctgcatagatgctccttaagttgggattacattgtaataaacgcaatgtaagtta

SEQ ID NO: 526 - DNA, 1500 bp, Homo sapiens
gtaaaccagcctttttttttttttttttttgagacagggtcttgctctatcgcccaggctagagtgcagtggcatgatcatggctcactgcagcatcgaactcctgggctcaagtgatccttctgcctcagcctcctgagtagctgggaatacaggagcatggcaccaagccctgctaactttaaaattttttataaagacagggtcttgccatgttgcccatgctgatcttgaactcctggcctcaagtgatcctcccatcttggcctcccagactgctgggattaaaggagcgagccatggtgctgggcctaaacaagcctttttaaagtgacttttcccccctattacagaatgcttttgaaagccaaaatgtatgtgatcaggagtgtgctctcagatgtttatttagtagtgcgcaggatgtagactacattatgtgggacgtgggtggtgatgggttgggaagctactggaattaggaggagagcttgaaccagcttgagacaggtggaagtggaaaggaagggtattaaatacaggagactgcccagtatttagcatgtgattagctgaaagtgtggcattatgaaataaagacgttaagacaagttgatttgaacttagaaaagagtaaaaataatgagtttacttcgaggtgaaatccttatcttcatcattattatcaccattactagattccaaaggaatacctgcaatttaagaaactgcaaacgcacgaaactacataactggtaagtattttaatgcatttaattaaaaattttccttatgttgctttggagttagtttttaaaattcttttcgttcataatcaggaaaggtagtaaccttacattcagcgacaccttagaaacatacccttttaacgcagcacatttcaatacagattgtgctgttccttttccaaccaccaggtggcgggcaagcgcccaagtcgcactcccgcctcatccaaggcagcctgcgtggctcccgggagcgcgcacgtcccggagcccatgccgaccgcaggcgccgtatccgcgctcgtctagcagccccggttacgcggttgcacgtcggccccagccctgaggagccggaccgatgtggaaactgctgcccgccgcgggcccggcaggaggtaagggcagaagggaagcctcggggcctattttcccggtagcgactgcctcgggggagggcctgcgggtgattcctgcgtcgcgtccgttcctgcccggggacgctgcggaagcggtcgcagaagcggcgagtacgctgtatggcaagcgcatattcttcccgggcagcacggcggctgtgagctggaattcagcgcgggcggtggggtgattgcggcgccccctggtggcagtcctccgcgcccctcccctgactccccctccctcccagcctcacccccgcgccgttgcagcgctagggctggatggcctgcgggtaagcggcagcaggcgcctagtgggaacccccggc

SEQ ID NO: 527 - DNA, 1147 bp, Homo sapiens
cttgagacaggtggaagtggaaaggaagggtattaaatacaggagactgcccagtatttagcatgtgattagctgaaagtgtggcattatgaaataaagacgttaagacaagttgatttgaacttagaaaagagtaaaaataatgagtttacttcgaggtgaaatccttatcttcatcattattatcaccattactagattccaaaggaatacctgcaatttaagaaactgcaaacgcacgaaactacataactggtaagtattttaatgcatttaattaaaaattttccttatgttgctttggagttagtttttaaaattcttttcgttcataatcaggaaaggtagtaaccttacattcagcgacaccttagaaacatacccttttaacgcagcacatttcaatacagattgtgctgttccttttccaaccaccaggtggcgggcaagcgcccaagtcgcactcccgcctcatccaaggcagcctgcgtggctcccgggagcgcgcacgtcccggagcccatgccgaccgcaggcgccgtatccgcgctcgtctagcagccccggttacgcggttgcacgtcggccccagccctgaggagccggaccgatgtggaaactgctgcccgccgcgggcccggcaggaggtaagggcagaagggaagcctcggggcctattttcccggtagcgactgcctcgggggagggcctgcgggtgattcctgcgtcgcgtccgttcctgcccggggacgctgcggaagcggtcgcagaagcggcgagtacgctgtatggcaagcgcatattcttcccgggcagcacggcggctgtgagctggaattcagcgcgggcggtggggtgattgcggcgccccctggtggcagtcctccgcgcccctcccctgactccccctccctcccagcctcacccccgcgccgttgcagcgctagggctggatggcctgcgggtaagcggcagcaggcgcctagtgggaacccccggcaggaagttagcatgggcggaccacacgggggccacacatgacttgtgaagaactactggacagtttggggaaatgactaccacgaaaaggcttactttcagttttgtttcagactccttttccacaatgtcatcagaacaatgggaa

SEQ ID NO: 528 - DNA, 1134 bp, Homo sapiens
ggttcaagcagttctcttgcttcagcctcccaagtagctgggattacaggcttgagcatctttttttatagtttcctgatatttttgtttatcaagttccaaacataatattgtgattgttgctaggtaatacattaagtttttaagttaatttgagggaacattgactcctttcagcattgctttccctttagaaaaatgatgtagccttctatctgtttagataacctttttttctttttctcttttttattgtattttaaattttgttgttgttactcctgaaacaccatagttagataacctttgatagccttcagtgaggctttactgaaaacacaagtttgacatatgtaaagttgactaacatttgaataacaaaggtgttttatttaatatttgtcatacctatatcatatacacttacatgtatgtgtgtgttcgtgtacatgtgtatgtgtctatcaacttatctttttttaaaaaaaaatttatctcaggagaaccatacagacttttgactggcgttgagtacgttgttggaaggaaaaactgtgccattctgattgaaaatgatcagtcgatcagccgaaatcatgctgtgttaactgctaacttttctgtaaccaacctggtatgttactaattttatttcactagtttccagtaagggggttgaaatcacaaaatattctcttggtttgtatgtgagagagagttcacaggatttgtcattttatagagctgtgtagacttttttaatgttaacaaaattaaatacttatattgtggcagtggtaccagtggtatttgttcattttgagatttgaagtttctatttcagtaatttactctttgttttagttagaaactcagaggaagtaggacatagttatttttatttgcttactaaacatttattgtttactattagtttggtgcaaaagtaattgctgtttttgccattagcagtaatgtgtttttatgtgtcagtaactgtgccaaccctgcgaatagaacaatgaacagaccttcatgactctggctcttaaagaggttatgtagctgtgtggaaacgggcatttctcatataatacaagtttttgcaatgggaattgatttgttttattaggg

SEQ ID NO: 529 - DNA, 1149 bp, Homo sapiens
gttttgtttctgttcttttaggtatagaaaaacattttggaaatttctacagaaaaagtaaaattgttactgtaagtcagaaacactagcctataacctcgtattctcatgggactaatttttacaatgtggttttgatactgtaaaacaaacaaaaaaagatctaggaatgaaattgtcatgttttaaatgaaacagactgcaccaaagcaaaaaattctcaaatgtgtgtgaggggtcaggagaatccccactgacttacacaaataaagaacatgtgtgttctaggaggggtattcctgggttaagaaacttccctaaggggaaatatgaattgttagttgagtgatcttcctctcaaggcaaccgaagcagtaattgttgtctgccgtgttgggaggttagccacctgcctattgtcttttcttttgaaaactttttctctgagaagtgaatgtactgagtggtaaaagactttaaattatttgctaacttttcagagtcaaacagatgaaatccctgtattgacattaaaagataattctaagtatggtacctttgttaatgaggaaaaaatgcagaatggcttttcccgaactttgaagtcgggggatggtattacttttggagtgtttggaagtaaattcaggtaagacattttaaaattgattttaaaatggacagctttgtttcagccaaatcctaaaggaaaatgatatttctgattaatgaatttaaaacagtataatttagttcctgcttagcacagtattggactctgtgccatgggtggtgagtgcattttgtacatcacggtgatgagagtttgagtgggccctgagggacttcatgggaagttacatttcttcgattcctcattggtgaaggtataatgttaacttttggtcattgttttttcttcatttggactcaagacttaggatttgataattttctaggttacaaagcttaatgatgaggaactgataatttcataggttacaaagggtaacaataaataaaagttacaataacagtatatgatgtgagcttaaagttttaaagtactaaaaattgccatctctgcaactctgatactatgactttatttaacttattctcatttacagaatagagtatgagcctttg

SEQ ID NO: 530 - DNA, 1160 bp, Homo sapiens
tgtttggaagtaaattcaggtaagacattttaaaattgattttaaaatggacagctttgtttcagccaaatcctaaaggaaaatgatatttctgattaatgaatttaaaacagtataatttagttcctgcttagcacagtattggactctgtgccatgggtggtgagtgcattttgtacatcacggtgatgagagtttgagtgggccctgagggacttcatgggaagttacatttcttcgattcctcattggtgaaggtataatgttaacttttggtcattgttttttcttcatttggactcaagacttaggatttgataattttctaggttacaaagcttaatgatgaggaactgataatttcataggttacaaagggtaacaataaataaaagttacaataacagtatatgatgtgagcttaaagttttaaagtactaaaaattgccatctctgcaactctgatactatgactttatttaacttattctcatttacagaatagagtatgagcctttggttgcatgctcttcttgtttagatgtctctgggaaaactgctttaaatcaagctatattgcaacttggaggatttactgtaaacaattggacagaagaatgcactcaccttgtcatggtatcagtgaaagttaccattaaagtaggttgaatgtcttgttcttatgttaaaaataagttatttgaatttaagcttacccactatacacagatttttttttaattactttaaaactatcagaactgttagttgtagatttatatatacccactccatccctttgtataccatttaggcttgagtggcttttcatataacctgtttattatctgagacaagccaaaagcaactaaaattatatttcagattttgtttagcattttaaaaagcgattctgttgtccttccaccgagaaggttatgacagtgcatactttgtgttttcagtcttaaagcaacgcaactagagattaactgccagtcttcaaagtttgcatctcatgtctttctatcaagttgtctttctccaatctccaggtgattcatctccttttaaacaggttgacctatagatttgtgggatccttttaggttaatatctatagtaaaaagccacaaatacttagattcctttattaaaaa

SEQ ID NO: 531 - DNA, 1104 bp, Homo sapiens
ttaccaaaaattattttatttactttctcaaaaaggctttattgcatagttacaatctttttgaaagacaattagtctaaaaatagctcatgttcatctcctaatattgtcttccctgaagcagatatgttacatttcctcaattctgaaatatatttttaacattttaatgtcttcgaaagtggaatgcattttaaaattgaattttattttatgttgttccaccctttccaaaaaagcagttttaaaaattagtattataatcggtgacttcttataattgagtgattatactgtgatttatgttctaaaataatgcagtgaccaaagaccgacttctattttatagattgtggcttctttataaatttagagagatgaaagggaaaacattattttttatggatgtaaacagcctctttgtagtttataacttaaaacttttctttaaaaaatgctagcatgtgaatatatatattcacatgttttcttcattgtagacaatatgtgcactcatttgtggacgtccaattgtaaagccagaatattttactgaattcctgaaagcagttgagtccaagaagcagcctccacaaattgaaaggtatattatgtattttaaatataacaagatgtcacttatatgatagcattgatttttatttaagttaattccctctttaatgcttgtttcaggatgtaatagttgctgtgttatagttcggtattattaatggaaggttttttgttagtttgtaaagaaagagttccccaaatttctttgttggttattctgtatctctgaaacaaatgttaaatatgtgctaatatttaaagaaaaaaatggaaagacagtaaatggcactgaggtaacctcatggtcagaagagcacatatgtcagttccaggcatcacgccacagttagctctggaattgtgtggtgcagcagccctctttgcaagccacatagtccagaatattaacagcaccatagctttgggaatggagcttagtttttctgagctccagttactcattgcaaaattgagagtaatacctacctagctgagttaaaaagtcaggaaacaacagatgctggcgag

SEQ ID NO: 532 - DNA, 1118 bp, Homo sapiens
tgaactgagtaaataatgtaagtttaaaaatttcctgaacttctccaaagagatctctaacaaaacactcataatagattgtgctagtagaattgaaacatgagcgttttaatagatattggctcctaagtaaacacaagatgctaatagaatttgatctttatggatgatgtttctctcaaacttttgtaattcagacaccttgtttgagtcatgtgtgtttaatgttcatcctgttatgattgtctaccttggattatttattttgagatattaatgatcaattctagctcttctttgtgtcacctgccaccatatttctagaaaacgcgattagatgctttttgtcattttgtcccagataaaattcttacttaaaaaaaatactataaaggtattatggaaattatgccttttgagtgtcagatagtcactccgtttacaatttaatagcaaacatagtagtatataattagaatatactttaattatttttacagtttttacccacctcttgatgaaccatctattggaagtaaaaatgttgatctgtcaggacggcaggaaagaaaacaaatcttcaaagggaaaacatttatatttttgaatgccaaacaggtaattatgttataagctaaattttcctaaagaatacattacaaactaggatacattattaactcttatcagtagttgttaacgtatttcattttgggattttgtgtaaaagtgtgaagtagaataaaaaaaccccaggcaccagacctgcccagtgatcatggctgtgattacggggtttcttaaaatctgtgataactggcctattcataaatatgcaagtgagaaggacaggaaacttagttttaacttctttagttagtaagctaaacctctttagttagtaagctcactaaagaagttaaatcagttgaatatgttctgtgtaccaaagtggggtttccaagagtttatgttgtagtggagaaatgcagataagcccacagttagagtgctgttaggaagtgtgatgaggaaccacagagagtgtaacagttccagggccgcagagacctgttgaactagggactttctcaaagtggaagctgaaatgacctact

SEQ ID NO: 533 - DNA, 1194 bp, Homo sapiens
gaagtagaataaaaaaaccccaggcaccagacctgcccagtgatcatggctgtgattacggggtttcttaaaatctgtgataactggcctattcataaatatgcaagtgagaaggacaggaaacttagttttaacttctttagttagtaagctaaacctctttagttagtaagctcactaaagaagttaaatcagttgaatatgttctgtgtaccaaagtggggtttccaagagtttatgttgtagtggagaaatgcagataagcccacagttagagtgctgttaggaagtgtgatgaggaaccacagagagtgtaacagttccagggccgcagagacctgttgaactagggactttctcaaagtggaagctgaaatgacctactcaagaagtagcaccaagtcttcttgaattgtacttctatgtttcccaaatcaaattcttatgtgttcaaaaaattactacattttactttaaaaaatgtttccttccatttttagcataagaaattgagttccgcagttgtctttggaggtggggaagctaggttgataacagaagagaatgaagaagaacataatttctttttggctccgggaacgtgtgttgttgatacaggaataacaaactcacagaccttaattcctgactgtcagaagaaatggattcagtcaataatggatatgctccaaaggtatagaattattctttattagtaaaaaactgcaagtaggagattttatgtttaaccttttttgttgcttttcacctaacaatgtaaaagtagatacaagaattttttttttttgagacggagtcttgctcttgttgcccaggctggagtgcagtggcacgatctcggctcactgcaacttctgccttctgggttcaagcaattctcctgccttagtctcctgagtagctgcgattataggcacccaccaccacacccagctaatttttgtacttttagtagagacagggttttgccatgtaggccaggctggtcttgaactcctgacctcaggtgatcctcctgcctcagtctcccaaagtgctgggattacaggtatgagccaccgtgcctggcctattttttatttttttgagacagggtcttgctctgttgtccaggctggagtgcagtggcacaatcttagctcactgcaacctctgccttctgggttcaaacga

SEQ ID NO: 534 - DNA, 1098 bp, Homo sapiens
tgagtagctaggattacaagcgtgcaccactacacccagctaatttttgtatttttagtagagatgaggttttaccatgttggccaggctggtctcaaactcctgacctcaagtgatccacccgcctcagcctcccaaagtgctgggattacaggcatgaaccaccatgcctggccataaaagcctgttctgttgtttaatttgggtagtactgtattctttttattccaaaaattgtagaattttagaactgggaagatctatattctttagccccttattttacagatgaagttaatggagttactaaaagatggtagacttgtcaacgtaacagtgccccagcgagtaagctattatagtactctgcatttgaaattctgtctataccataaaattatttgggaggaaaaaaaagaggttgctttatcttgacattatctgaataaaagttgctagttttaatatattatcatacttaaactattttattctaataggcaaggtcttagacctattcctgaagcagaaattggattggcggtgattttcatgactacaaagaattactgtgatcctcagggccatcccagtacaggtaattgaagcattattttattgattcgttagcaactttattatgtaaatcgataagctaaatatacgttactcatatacttgctaggggtgaccatattcaccatgttttaaaattcatccatttatactttcatttattcattccataaatatttgtggctgccatgtagcagaaactgttatgaagtggtaaataaaataagaaagatccttgttattataaactttatgttctgaagatcaagatttagtaaccaaacacacacacatggtaagttcagatcaagccaagtataaagacaggtaaaacaaggtgatgtatgtaatagtgatggtagtaggctatttagataggtattcaaggaaagtctcaggaggtgacatttgagccatgtgtcctgaatgatgggaaaaggcagctgtgtgaggatctgggtggtggataattccaggtagaaggaacagatcactcttaggtttgtgtggagaattctaagg

SEQ ID NO: 535 - DNA, 1130 bp, Homo sapiens
ttcttctggtaagtaaaaagatgaggtaatcattatggttttctggagtagccagaagtttatgtctaagatggttttacatgatttgtttcaaataatgtattccttatgaaaataaaactcactaattctgatttctatagatggtagggtgtatacactttctgtgggggaataaatgtaattttttggcccactgacttaaaacataatttgaattagaatttgcttattttatttttctttcagttgataagacttcagcacaaagtatctgatgtggctttaaaatgatttggtttagataagcccgtcatagatgcccgcaggctgcttatagactgttttgtgtttgttggtaccactcattggagaaaaccatgtgcagtattccctagttaatcccctcagcatggtatagtctaacaattttaagtgaccagatgttcatcttctatctagcagttgtgattctttctttctacttgtgtgatttacaggattaaagacaacaactccaggaccaagcctttcacaaggcgtgtcagttgatgaaaaactaatgccaagcgccccagtgaacactacaacatacgtagctgacacagaatcagagcaagcagatacatggtaaagcttcttcattaccgtactattgttattattctatcaataaattaatagtatattcaggaagtaatgccctttatcaggttgtctcttgagagagaaagcatggaagaatgggataccagggaaaatgatatcttaggacaagggtcagcaggttttctgtaaaggagcggcgagtagttattttcggctttgaagactgttgatctctgtcccagctcctccactctgccactgtagcatgaaagtggccatagacgatatgtagtcattgtcaagagacaatacgtagtctcttaaagacaaggatactttccaagaaatgcttccttacacaattttggcattgtgtgaacatcgaacagtgtgttgacataaacctacatggtatagcgtactgtatagtatagatagcccaggggttccttatctctcagccacggtatcagtccatcacctgttaggaaccaggccacacagcagtaggtgatcagcgg

SEQ ID NO: 536 - DNA, 1273 bp, Homo sapiens
atctggctgaaataatgatatcagttcatttacagtgacctgaatatcttatatgtgattttattctgattttccatttttaataaaaaggtactataataatataataataaataataatgaaagtaccataatagtgattttacgtgggaataatttaaaatttttaaacaaaacagaaattgcctaggattatcacctagtttaacttataataggctatgctaagttggtattctgtgtgtgtttgtcagtcgtctatagtggagcaacaatatgtgctgtagggggtgaagaagagtaaggtatcatccttccacaggatgcttaggtaataaaggagttgctttcttgggatggtaaaatatattcagtgtatttttgtctaaaaattatcttctaaggttatattacgttagaactatttaacgatctttgtttctctattaaagttgctgtaaacttgattatttaccttgcattcttttctttttctacagggatttgagtgaaaggccaaaagaaatcaaagtctccaaaatggaacaaaaattcagaatgctttcacaagatgcacccactgtaaaggagtcctgcaaaacaagctctaataataatagtatggtatcaaatactttggctaagatgagaatcccaaactatcagctttcaccaactaaattgccaagtataaataaaagtaaagatagggcttctcagcagcagcagaccaactccatcagaaactactttcagccgtctaccaaaaaaaggtctgtttttgataacttctctcatgtctctgaaaaaaaaatgaaagttttttatactgttgtagaatggtattgtctttagtctgttctgattaagtatgcttctgctgctgcagctttttgaccgctttccctctcagaaatgtccctgatctccttcactagagccactagacagtttctccttcatctccttctatgtatgtacttacgtgttattttacttgccgcaattctcttcaataagaactaaccccctgtctcagctctaaaatcacatttctgctggttttccttgagaaccgctctcactccctctaggaccatattccatcaattattttctcaatttccatattttgaatatattgatcatcccagatttttttcttctgttttcaaaagttcaatctcacctttatttttgaaaaccttctcttgacctggtttcttcctctagctactgctgccttttttcttgtgccgtcccgttaagcttc

SEQ ID NO: 537 - DNA, 1448 bp, Homo sapiens
ataggaaacttttagtgatatattcacatagcatttgcagtatacagtcagtaccgtattgtagatttagtcactctgacttactgtcttgaatccatctctcattaacccatcagattgtattcccagggcagttttccctgcccacaaccttactacgttataaagtaagttgctgtctcttggcaacagtttctttgtatttttatatttttctaccttttcctgtaatttatcaactaatgcaacttaagcagagaagatagagatcaccgtactgctttagccacagggtccgtcagttctatcaaaacagcagaatgtatgtgagttctgcactgttttcaaaggtctatttgttgatttccagtaatattgttaataaaatcaagagtacattgtgaactaaatggagggagtgatgaatattgccaaactaaatggttacttagctgtgttcattttcttgttttgttttcttctttttttttaaatctaagggaaagggatgaagaaaatcaagaaatgtcttcatgcaaatcagcaagaatagaaacgtcttgttctcttttagaacaaacacaacctgctacaccctcattgtggaaaaataaggagcagcatctatctgagaatgagcctgtggacacaaactcagacaataacttatttacagatacagatttaaaatctattgtgaaaaattctgccagtaaatctcatgctgcagaaaagctaagatcaaataaaaaaagggaaatggatgatgtggccatagaagatgaagtattggaacagttattcaaggacacaaaaccagagttagaaattgatgtgaaagttcaaaaacaggaggaagatgtcaatgttagaaaaaggccaaggatggatatagaaacaaatgacactttcagtgatgaagcagtaccagaaagtagcaaaatatctgtaagtaacattttaaatgagaggtatagtacatagaagcttagaatgctaacaggtactttcgattttgtattgacagtatgagcatccattaatgtctttaacactcagtactatagaaatttgttggttgataaggtaaatggtaaatgttaaaagtacagtgattcttcagtagtgtaaaataaatgaccacaaattaaactttcatatgagattgttttactagatttccaaattaggctgtactattataaaagacatttggctatgatgataagtgtaggagatgcttcagtataagaaacaggcacagaaagatgaagttagtaaaacaaagtatctactcaataaatttttaggatataacatcactaggaattttcattttcatttaggttttgtaatgtccttgtctattttcatgactgttgataatttgtcttacccactttgatctatgaaaacacctgagattattttcttttttgtatacatca

SEQ ID NO: 538 - DNA, 1069 bp, Homo sapiens
gtaaacttgaattcttttaaaatgtttcttttttgattttaaaagtaatacacgatcgtacagacatgtagaaaataaaacagacagtttgttgataatcctaccatctacagacaaccatggttaatattttggtattttctctttccattttattttgcagactgttagtgcaattttgtagtcattttttaaatttacttataatcattttcccatattgttaaatattctctaagcatgtgatttatatggatttagatcgcttccaattctttgtcctgatactgcagtatctctttcaatatatattttcatctcataatttcttttggaaagacagttgaaagccaaatgcctggtcatacataacatgaatatctcttaagtttttagaaaggaaccattttacacttcatcttattcaaaaggccaagaagtgatagaaacataccattttattactcctatgaacagtattttttattttatttctttagcaagaaaatgaaattgggaagaaacgtgaactcaaggaagactcactatggtcagctaaagaaatatctgtgagaaacgttttattaatttttatacagatttggcttacggggactgtcatctcatcaatttttgtgattttacattcttaggattatttctctttcctaattatggcttacttcatgattgtgccttgaaatggattgatcatggtattattattattattattttatttatttgtttatttatttattttgagacggaatctcgctcttgttgcccaggctggaatgcaatggtgtgatctcggctcaccgcaacctcagcctcctgggtttaagctattctcctccctcagcctcccgagtagctaggactacaggcatgtgccaccacgcccgactaattttgaatttttaatagagacggggtttctctatgttggtcaggctggtctggaactcccgacctcaggtgatctgcccgccttggcctcacaaagtgctgggattacaggcttgagccaccatgcacggcctggatagatcgtattataaccatg

SEQ ID NO: 539 - DNA, 1156 bp, Homo sapiens
gtccagaactgatgattgacttttttgaggtgttaagaataataaaagatacaaactcttgagaatcccaaaagtttaagaaaagtagatgaggacctgtagaacaggatatattataatctcagtgtacaattttaatgaaaagcaaacagtgctgagattttgtgtcaataagatatatatctggaggtaaattgtttactgagatgatatttattagaataactactaggttaaaaatgcttcacagtttttagccttctgtcacagatgagtatgttataaatgtttccaaagtttatagagcatttgagtaagtaattttcttatcttgaattagctacaatttgattccaaatacaaagttcaggtacaagaaataaaacatttttactattttttcaggtatttgaacttttttctatagattcccaaatgacaagtgacttttctttgttatttcttctctttcttacctatccatcttaaccccatttaagaacaatgacaaacttcaggatgatagtgagatgcttccaaaaaagctgttattgactgaatttagatcactggtgattaaaaactctacttccagaaatccatctggcataaatgatgattatggtcaactaaaaaatttcaagaaattcaaaaaggtaggtatttcaactgtatcacaagaggtcagtgtttgaaatgtttttagagataccagtgatgctaaacaaagataaaagcagtttatgttgaaaactgatacttcttctgcttaaaatgctttaaaaaattcctctaggaaggatatgaacttacagttaatgaatatattgaacacctagaatgaaatagatttcatcaagattgaattctttagaggttgctgtttacctggttttctctaccttaagcaggaagtttttgttgataatcacaggatcttctctgttagtctaatattggtctacaactacttgaggaggttctttagctcaggactttatgaagattaaaatgtatttaaaataactaagcatattcagtaattcaaactatagtctatatttacatataaaacacaatataaatatatatgctgagtatgatcatcagacctgagtttctgctcattaaggaactgatacttattttatcagta

SEQ ID NO: 540 - DNA, 1114 bp, Homo sapiens
tttactagtaaacaattaaaatatcaattagaagtataaattgttggcatccccaacatctcctgcttggactctgtgaactggaaagttttgaaaaagatttaaattttcatcaatattagaaagggcttaagctttgaagtcattagaacaaaatacagtgctttgaattgtagtgtttgtgttcatcttgagttgctttaattgttaaatgataaggtaaggccattttaaaataaaaactccaaatgaaaagtgttaaattatttttaatacataaatcccatgacatgtccagatctgtatatagtaatagctataaaagaagggcaaaaacagatgggtttagaacagagttactgctctcacttttatttgtagaatataaacatctttggcacttatgcatgatttaccatctttgctttttaatctttttaaaaaaatggtcatttttgtttgttaatatgatttactgtactacttttattattcaataggtcacatatcctggagcaggaaaacttccacacatcattggaggatcagatctaatagctcatcatgctcgaaagaatacagaactagaagagtggctaaggcaggaaatggaggttagtaggaagtgaggcccagaaacttgcttaaattgcactttggtccattatggtggccttcaagcaaattcttcttaaaaccaaattaaaataagtgacataaagtcattcattcaggagcattcctgagttacagagcattaatctatacccttccataacacttctttaaaagaatactaaatttatttttgttaaaaaaaaaaaaaaaggtgagacctaagaaattcagtttacatcctaatgaaaagggggagataaaagccacaaaaatttaagggaaactaaaagaatgtggaggatattacaaatatatcacttaaatgtatgtcaagggactggcctttttaaatctggggattgtgttttaacaattctgaaaatttcttattcattctcttgaatattagttacctttttactgttttccccattatctccttctggaattccaacttaacgtaagttaaattttcttttccatttgtctttcctgt

SEQ ID NO: 541 - DNA, 1050 bp, Homo sapiens
tgctgtagaagtttagtgagtttgtatttaaaaggacttcagaggagaggtaatttagcagcagcttctaagccctgatgtgggaccaagaacacaggagcctctttaactgtggagctgctctagttgaaggtggggtaaatgttgccctcttagtctcatcagtggtctgacccccaagcactgaaatctcatttagtaaaagggttttgctggaaagagtgtttaaaaactcagcaagctagcaatatactattggttgtctttgagtggagatgggtgggagaaagctgtttagttagagctcttttgtaataatcttagcatggattgaaaatatagaggatcagttgaatgaaatattgtagaggcaagaactcagatgtggtgacctccaggatgtggaaatctctaagatgacagtgacctatcactatagcaattcattaactatatattcaccactgagcaaatgtttgaaattatgttaattttgacaggtacaaaatcaacatgcaaaagaagagtctcttgctgatgatctttttaggtaaagtttgattcacctttctcatgtacctttgagagatgtatataaaatttagttctgttcatagaaattaagaatttgtttcttctgtcctcatagacacctagtcccttcacctaacacaagtgtttatttttattacttaagcacctctcaattgggtttattggctatagcatcgaggtttggggttaagttataagatacttaaaatttgtatgggggcattcaggcaaaaagacggttcccgaattgtgtgaaattgttgtatagatttgtgagatttttcagctctgagtagaattacgattgagttttgaattaagacaagtaaaatgccagaccatttgtttagtttttattggcacatgcataaaaacaaaaggctagattaaagtttcaaagcaggtttttgtgggaggttttagagttgtactttgtgattataatttaattctgatttaatacattttcagcattcctgcaggcctaacaaacct

SEQ ID NO: 542 - DNA, 3277 bp, Homo sapiens
atctcaaaaaaaaaaaaaaaaaaaagtgttgacagacaatactggtttttcattagtcaaatgagatgggttgttcagccatatttgtttaactgctgtaggagaaaatgttgtaaagtgctaattacatttaagtagattatgctcttttgtgcaaatgatatgcttttattatggggaggaatggggatctttgaagccatacagaaagaagtgtaaacataccttcatttttaaactgttttcattaattattttaaagctttaaaggatttttgttattgttgattttttttttgtttttaccatattttcatcaaagcaacatcaaagggatacatgaaaataaaaatgtcagtgcttagtatctgatcctaaggacaaaattgtcattcccatcctatttgccaaagtgtgactacagtttgaaagttctttacctttaaaagaaataccatcccttatctaaatatcatttaaccccatttctttctttgcagatacaatccttatttaaaaaggagaagataactgaggattttaaaaagaagccatggaaaaacttcctagtaagcatctacttcaggccaacaaggttatatgaatatatagtgtatagaagcgatttaagttacaatgttttatggcctaaatttattaaataaaatgcacaaaactttgattcttttgtatgtaacaattgtttgttctgttttcaggctttgtcattgcatctttttttcatttttaaatgtgttttgtttattaaatagttaatatagtcacagttcaaaattctaaatgtacgtaaggtaaagactaaagtcacccttccaccattgtcctagctacttggttcccctcagaaaaaaattcatgatactcatttcttatgaatctttccagggatttttgagtcctattcaaattcctatttttaaataatttcctacacaaatgatagcataacatatgcagtgttctacaccttgcttttttacttagtagattaaaaattataggaatatcaatataatgtttttaatattttttcttttccattatgctgtagtcttacctaaactctggtgatccaaacaaaatggcttcagtggtgcagatgtcacctacatgttattctagtactagaaactgaagaccatgtggagacttcatcaaacatgggtttagttttcaccagaatggaaagacctgtacccctttttggtggtcttactgagctgggtgggtgtctgttttgagcttatttagagtcctagttttcctacttataaagtagaaatggtgagattgttttctttttctaccttaaagggagatggtaagaaacaatgaatgtcttttttcaaactttattgacaagtgattttcaagtctgtgttcaaaaatatattcatgtacctgtgatccagcaagaagggagttccagtcaagagtcactacaactgattagttgtttagagaatgagaaatggaacagtgaggaatggaggccatatttccatgacttcccttgtaaacagaagcaacagaagggacaagaggctggcctctacatcactctcaccttccaaatcttgtggaagtgcatctacttgccagaaccaaattaacttacttccaagttctggctgcttgcaggtggaactccagctgcaagggagttagggaaatgaaggtctttttttaaaagcttctcagccttcctagggaacagaaattgggtgagccaatctgcaatttctactacaggcattgagaccagttagattattgaaatattatagagagttatgaacacttaaattatgatagtggtatgacattggatagaacatgggatactttagaagtagaattgacagggcatattagttgatgaaatggagtcatttgagtctcttaatagccatgtatcataattaccaagtgaagctggtggaacatatggtctccattttacagttaaggaatataatggacagattaatattgttctctgtcatgcccacaatccctttctaaggaagactgccctactatagcagtttttatatttgtcaatttatgaatataatgaatgagagttctggtacctcctgtctttacaaatattggtgttgtcagtatttttcctttttaaccattccaatcggtgtgtagtgatgtttcattttggttttaatttgtatatccctgatagctataattgggtcatagaaattctttatacattctagatgcaagtctcttgtcggatatatgtattgagatattacacctagtctgtggcttgactgttttctttatgtcttttgatgaatagaagttttaaattttgacaaggtcaaatttatttttttcttttgtttgatattttttctctccaatttaaccccaagatttcagatattctgctctattatataaactttatatttttatatttgtgatctaccttgaattgatatgtatgttgtgaattatggatcagggttctttttttcccccatacaagtatccagtcattgtaacactgtttattgaaagaattatcctttcctcattaaattaccttgccaattagtaaaaaatcaattaaccataatggtggatctgtttctggactttctgtttggttacactgaaatgtttgtccatccttgcactcactcataccatactgccttgaattactgtagctgcatagatgctccttaagttgggattacattgtaataaacgcaatgtaagttgaaaatactgtatttaagtcaaaagtgcatttaatacaccttaacctacgtcatagcttagcctagcctaccttaaatgtactcatgacacagtagcctatagttgggcaaaatcatctaacacaaaagctattttattgtaaagtactgaatatttcatctaatttattgaatagtaaactgaaagcaaaaaacagaatgattgtgtagctactcactataaacatacacagctgaaagcgcactgggcctgaagaatgtttgaagcattgaactaaaattgcggcatgatggggaatactacagcaacaggattatcaatttccctactgattaggcttgagtagaagcattggttgaaggcactaagggcatcaatacttgatggtttagcaggaatagtgttcttcacaaagagcaagaatcagtttttaccctcttgatgctgtggctgacgggaagctacggcttgctgctgctgcccagcattgcaagattga

SEQ ID NO: 543 - DNA, 1500 bp, Homo sapiens
ggatatatgtattgagatattacacctagtctgtggcttgactgttttctttatgtcttttgatgaatagaagttttaaattttgacaaggtcaaatttatttttttcttttgtttgatattttttctctccaatttaaccccaagatttcagatattctgctctattatataaactttatatttttatatttgtgatctaccttgaattgatatgtatgttgtgaattatggatcagggttctttttttcccccatacaagtatccagtcattgtaacactgtttattgaaagaattatcctttcctcattaaattaccttgccaattagtaaaaaatcaattaaccataatggtggatctgtttctggactttctgtttggttacactgaaatgtttgtccatccttgcactcactcataccatactgccttgaattactgtagctgcatagatgctccttaagttgggattacattgtaataaacgcaatgtaagttgaaaatactgtatttaagtcaaaagtgcatttaatacaccttaacctacgtcatagcttagcctagcctaccttaaatgtactcatgacacagtagcctatagttgggcaaaatcatctaacacaaaagctattttattgtaaagtactgaatatttcatctaatttattgaatagtaaactgaaagcaaaaaacagaatgattgtgtagctactcactataaacatacacagctgaaagcgcactgggcctgaagaatgtttgaagcattgaactaaaattgcggcatgatggggaatactacagcaacaggattatcaatttccctactgattaggcttgagtagaagcattggttgaaggcactaagggcatcaatacttgatggtttagcaggaatagtgttcttcacaaagagcaagaatcagtttttaccctcttgatgctgtggctgacgggaagctacggcttgctgctgctgcccagcattgcaagattgagtattctatgggcacattactagccagggaaaagaacaaaattcaaagtaggctttctactgaatgtctatcactcttgtactaccatctagtcaaaaaatggtaagtcaggactatgcaggaagtctagaagtcagatacatcagtcctctgagcatgtcaatttctatcccaaaaatcggctagaattattgtgctgaatctaaaaatcaatttgtgaagaactgacatcttaaaaatattcagtctttcaatccatgcatgtaaaatgtctattcatttacttagatctactctttccacattgttttgtagtttcactgtagaggctcagacatctgttttaatctgtccctaagcatttttttggtactgtaaacgatactttcagaaagttcatcttgcaatgatttattctatatgaaaatacaattacttttggtgtatagaatttggatcctgtgaacttgctaatctcacctattctggcaaaatttttt

SEQ ID NO: 544 - DNA, 4069 bp, Homo sapiens
gcaggccgaatggtggatttaattggccggagtttagggcgcgcttggcccgcgtgggtcagctgatcgcgcactgagggtgcgatcccgggctccccattccttcctggggcgcctccccggcccagggccaactgggtcccggtgtcggcaggcctggggtcggcgacggctgctcttttcgttctgtcgcctgcccgatggacgagcctcccgggaagcccctcagctgtgaggagaaggaaaagttaaaggagaaattagcattcttgaaaagggaatacagcaagacactagcccgccttcagcgtgcccaaagagctgaaaagattaagcattctattaagaaaacagtagaagaacaagattgtttgtctcagcaggatctctcaccgcagctaaaacactcagaacctaaaaataaaatatgtgtttatgacaagttacacatcaaaacccatcttgatgaagaaactggagaaaagacatctatcacacttgatgttgggcctgagtcctttaaccctggagatggcccaggaggattacctatacaaagaacagatgacacccaagaacattttccccacagggtcagtgaccctagtggtgagcaaaagcagaagctgccaagcagaagaaagaagcagcagaagaggacatttatttcacaggagagagactgtgtctttggcactgattcactcagattgtctgggaaaagactaaaggaacaggaagaaatcagtagcaaaaatcctgctagatcaccagtaactgaaataagaactcaccttttaagtcttaaatctgaacttccagattctccagaaccagttacagaaattaatgaagacagtgtattaattccaccaactgcccaaccagaaaaaggtgttgatacattcctaagaagacctaatttcaccagggcgactacagttcctttacagactctatcagatagcggtagtagtcagcaccttgaacacattcctcctaaaggtagcagtgaacttactactcacgacctaaaaaacattagatttacttcacctgtaagtttggaggcacaaggcaaaaaaatgactgtctctacagataacctccttgtaaataaagctataagtaaaagtggccaactgcccacaagttctaatttagaggcaaatatttcatgttctctaaatgaactcacctacaataacttaccagcaaatgaaaaccaaaacttaaaagaacaaaatcaaacagagaaatctttaaaatctcccagtgacactcttgatggcaggaatgaaaatcttcaggaaagtgagattctaagtcaacctaagagtcttagcctggaagcaacctctcctctttctgcagaaaaacattcttgcacagtgcctgaaggccttctgtttcctgcagaatattatgttagaacaacacgaagcatgtccaattgccagaggaaagtagccgtggaggctgtcattcagagtcatttggatgtcaagaaaaaagggtttaaaaataaaaataaggatgcaagtaaaaatttaaacctttccaatgaggaaactgaccaaagtgaaattaggatgtctggcacatgcacaggacaaccaagttcaagaacctctcagaaacttctctcattaactaaagtcagctctcccgctgggcccactgaagataatgacttgtctaggaaggcagttgcccaagcacctggtagaagatacacaggaaaaagaaaatcagcctgcaccccagcatcagatcattgtgaaccacttttgccaacttctagcctgtcgattgttaacaggtccaaggaagaagtcacctcacacaaatatcagcacgaaaaattatttattcaagtgaaagggaagaaaagtcgtcatcaaaaagaggattccctttcttggagtaatagtgcttatttatccttggatgatgatgctttcacggctccatttcatagggatggaatgctgagtttaaagcaactactgtcttttctcagtatcacagactttcagttacctgatgaagactttggacctcttaagcttgaaaaagtgaagtcctgctcagaaaaaccagtggagccctttgagtcaaaaatgtttggagagagacatcttaaagagggaagctgtatttttccagaggaactgagtcctaaacgcatggatacagaaatggaggacttagaagaggaccttattgttctaccaggaaaatcacatcccaaaaggccaaactcgcaaagccagcatacaaagacgggcctttcttcatccatattactttatactcctttaaatacggttgcgcctgatgataatgacaggcctaccacagacatgtgttcacctgctttccccatcttaggtactactccagcctttggccctcaaggctcctatgaaaaagcatctacagaagttgctggacgaacttgctgcacaccccaacttgctcatttgaaagactcagtctgtcttgccagtgatactaaacaattcgacagttcaggcagcccagcaaaaccacataccaccctgcaagtgtcaggcaggcaaggacaacctacctgtgactgtgactctgtcccgccaggaacacctccacccattgagtcattcacttttaaagaaaatcagctctgtagaaacacatgccaggagctgcataaacattccgtcgaacagactgaaacagcagagcttcctgcttctgatagcataaacccaggcaacctacaattggtttcagagttaaagaatccttcaggttcctgttccgtagatgtgagtgccatgttttgggaaagagccggttgtaaagagccatgtatcataactgcttgcgaagatgtagtttctctttggaaagctctggatgcttggcagtgggaaaaactttatacctggcacttcgcagaggttccagtattacagatagttccagtgcctgatgtgtataatctcgtgtgtgtagctttgggaaatttggaaatcagagagatcagggcattgttttgttcctctgatgatgaaagtgaaaagcaagtactactgaagtctggaaatataaaagctgtgcttggcctgacaaagaggaggctagttagtagcagtgggaccctttctgatcaacaagtagaagtcatgacgtttgcagaagatggaggaggcaaagaaaaccaatttttgatgccccctgaggagactatactaacttttgctgaggtccaagggatgcaagaagctctgcttggtactactattatgaacaacattgttatttggaatttaaaaactggtcaactcctgaaaaagatgcacattgatgattcttaccaagcttcagtctgtcacaaagcctattctgaaatggggcttctctttattgtcctgagtcatccctgtgccaaagagagtgagtcgttgcgaagccctgtgtttcagctcattgtgattaaccctaagacgactctcagcgtgggtgtgatgctgtactgtcttcctccagggcaggctggcaggttcctggaaggtgacgtgaaagatcactgtgcagcagcaatcttgacttctggaacaattgccatttgggacttacttctcggtcagtgtactgccctcctcccacctgtctctgaccaacattggtcttttgtgaaatggtcgggtacagactctcatttgctggctggacaaaaagatggaaatatatttgtataccactattcataagttagggtaaagtgaaaacacaattttctggatatattgggcctcttagtattttttggagttttaaatataaaggagaatatctgaatgacacttaaaatgattgcttgtttatgtccagacagacttattttttattctaatgatggtagcaccactgatcttggatgtacatttatgtatactttgagaaaaagggttttaggttgatttttgtaatttcccacatttgtacatgtgcttttaaaggtgtacataaagcttcaaatggcaataaatatttatttttatacattcaaaaaaaaaaa

SEQ ID NO: 545 - DNA, 1500 bp, Homo sapiens
ctatgagtatcagagttgtgagaaagcaaagaaaaccaaaataacgatagtaacgttaattgaccacttgccctgtttccaagattttacaaacatatcatgtactgatcataaagaaccaaatcggcagggtgcggtggctcacgcctgtaatgccagcactttgggaggccgaggcgggtcgatcacctgaggtcaagagttagggacctgcctggccaacacggtgaaaccccgtctctaccaaaaaatacaaaaattagccgggcgtggtggcgggcgcctgtaatcccagctactcgagacgctgaggcaggagaatcgcttgaacccgggaggcggaggttgcagtgagcagagatcgcgccgcggccctcaggactgggcgacagagtctccgccccccaacccccttcctcaaaaaaaaagaaccgaatcgtttttagcgcaagttaacagatacaaaaggcagtgtaaaagggcccgaagtccgagctgtaattcgtatgaacaggatgggacttgtcctatcctcccgaaggcactttacccctatgagaaaatcaggaataaatacaaaaggcctcaactggccaagcgcggagtaaacagcaaagccagacggtacacggggcatcgctagataatccgggactaatggccaaagggacaggggttggtggggtaggggcaggttgggaacgccgaccaggcctcaaagggacgcagggttggaaagaggaggatacatatctggacccgcgcaccgtctcgatgtactcagacttgttgtagagcagctcgcccaactccatggccgccgcctccttccctcagccccggatcctgtcagagtcagtcggtcagtctttcagagattccggctacttccggccgctcctccacttccgctccaggtggcccactgggactcatcgacagcgcggctctcctttaggcggcctcgctccactgctcggccgtctacggctgcgcgtgcgcaggccgaatggtggatttaattggccggagtttagggcgcgcttggcccgcgtgggtcagctgatcgcgcactgagggtgcgatcccgggctccccattccttcctggggcgcctccccggcccagggccaactgggtcccggtgtcggcaggcctggggtcggcgacggctgctcttttcgttctgtcgcctgcccgatggacgagcctcccgggaagcccctcagctgtgaggagaaggaaaaggtgccgggggtgcgggaagggcggacgcaggactctgaccccgctttcccagggttttaggcctggctttgtgtcctcggcagtccgagggcagcagtatcatctgaccaccccctcctcttagggctgagggggcacagaaaatgaaaatgtggaaatagcgtggtgctcacgtggtggcgtttaaagaacaaatttcattacagtagcagcgcattaatacaatgtgtaacagtttgtagataaagctgt

SEQ ID NO: 546 - DNA, 1248 bp, Homo sapiens
attcgtatgaacaggatgggacttgtcctatcctcccgaaggcactttacccctatgagaaaatcaggaataaatacaaaaggcctcaactggccaagcgcggagtaaacagcaaagccagacggtacacggggcatcgctagataatccgggactaatggccaaagggacaggggttggtggggtaggggcaggttgggaacgccgaccaggcctcaaagggacgcagggttggaaagaggaggatacatatctggacccgcgcaccgtctcgatgtactcagacttgttgtagagcagctcgcccaactccatggccgccgcctccttccctcagccccggatcctgtcagagtcagtcggtcagtctttcagagattccggctacttccggccgctcctccacttccgctccaggtggcccactgggactcatcgacagcgcggctctcctttaggcggcctcgctccactgctcggccgtctacggctgcgcgtgcgcaggccgaatggtggatttaattggccggagtttagggcgcgcttggcccgcgtgggtcagctgatcgcgcactgagggtgcgatcccgggctccccattccttcctggggcgcctccccggcccagggccaactgggtcccggtgtcggcaggcctggggtcggcgacggctgctcttttcgttctgtcgcctgcccgatggacgagcctcccgggaagcccctcagctgtgaggagaaggaaaaggtgccgggggtgcgggaagggcggacgcaggactctgaccccgctttcccagggttttaggcctggctttgtgtcctcggcagtccgagggcagcagtatcatctgaccaccccctcctcttagggctgagggggcacagaaaatgaaaatgtggaaatagcgtggtgctcacgtggtggcgtttaaagaacaaatttcattacagtagcagcgcattaatacaatgtgtaacagtttgtagataaagctgtatcgacacccttgctcctcccccctcccacaccctcaatctttacttctccccccggacggcctcaagtaaatcttttaagtctggtacttccaggtcctttcgtgtgttaatgtgggtggtggaggaggggcgtatccctaaccaccaaaaaggaatcctatgtatattttttggagaagggaatgttcataaatggtatgatctgaatggttctgcaggttccgtttagctttcctgtcaggacat

SEQ ID NO: 547 - DNA, 1060 bp, Homo sapiens
ctaattgacacatagtgggtatcaattattattccaggtactagagatacctggaccattaacggataaatagaagattcatttgttgagtgactgaggatggcagttcctgctaccttcaaggatctggatgatggggagaaacagagaacatagtgtgagaatactgtggtaaggaaagtacagaggactggtagagtgtctaacctagatttggagaaggacctagaagtctatcccagggaaataaaaatctaagctaaggtttgaggaatcagtaggaattggcaaaggaaggacatgttccagatgataggaacaggttatgcaaagatcctgaaatggtcagagcttggtgctttttgagaaccaaaagtagattgttatggaccagtgctactccctgcctcttgccaagggaccccgccaagcactgcatcccttccctctgactccacctttccacttgcccagtattgttggtgtttttcttcttccagttaaaggagaaattagcattcttgaaaagggaatacagcaagacactagcccgccttcaggtaagtgaatcgtattctcaaattaaggtgttatagtacaaacaatttaaaaacagttcttgactctataaaactttaaagaaaacgtatttctggggctgtttttgtctcctctagcgtgcccaaagagctgaaaagattaagcattctattaagaaaacagtagaagaacaagattgtttgtctcagcaggatctctcaccgcagctaaaacactcaggtaaatctagaccattcacttatgcctgctttattattcatttcccaggtatattttggctattgttctttttcccacagtgtgaagataatgactagcaatagacgctttaattttaattttaattttaattttatttttttgagacagagtctcactctttgttacccaggctggagtgcagtggcacaatcttggctcactacaacctccaactcccaggctcaagtgattctcgtgcctcagcctcctgagtagctgggactacaggcacgtgcac

SEQ ID NO: 548 - DNA, 1103 bp, Homo sapiens
aaagtacagaggactggtagagtgtctaacctagatttggagaaggacctagaagtctatcccagggaaataaaaatctaagctaaggtttgaggaatcagtaggaattggcaaaggaaggacatgttccagatgataggaacaggttatgcaaagatcctgaaatggtcagagcttggtgctttttgagaaccaaaagtagattgttatggaccagtgctactccctgcctcttgccaagggaccccgccaagcactgcatcccttccctctgactccacctttccacttgcccagtattgttggtgtttttcttcttccagttaaaggagaaattagcattcttgaaaagggaatacagcaagacactagcccgccttcaggtaagtgaatcgtattctcaaattaaggtgttatagtacaaacaatttaaaaacagttcttgactctataaaactttaaagaaaacgtatttctggggctgtttttgtctcctctagcgtgcccaaagagctgaaaagattaagcattctattaagaaaacagtagaagaacaagattgtttgtctcagcaggatctctcaccgcagctaaaacactcaggtaaatctagaccattcacttatgcctgctttattattcatttcccaggtatattttggctattgttctttttcccacagtgtgaagataatgactagcaatagacgctttaattttaattttaattttaattttatttttttgagacagagtctcactctttgttacccaggctggagtgcagtggcacaatcttggctcactacaacctccaactcccaggctcaagtgattctcgtgcctcagcctcctgagtagctgggactacaggcacgtgcactaccacacctgactaattgttatatttttagtagagatggggtttcgccatgttggccaggccggtcttgaacccctggcttcaaatgatctgtctgcctgggcctcccaaagtgctgggatacaggtgtgagccactgtgcccggctgcaatatattctaattaacataaaattcatatgccgtaaaatctatagtctctattttcagttagactgttt

SEQ ID NO: 549 - DNA, 2473 bp, Homo sapiens
tgggagtgttattaaaattacttgagccaagggggaaaataaagaaagaaatacatgagatagaaaactagttgagatttagaagttaagagaagagattgtgtgataaagaatactctgttcgtttaaaaaacatttttagcacaatgctgtttgtttatatgtacttaaaatttcatagattattagaatttaaaaaatcagaacttttaaaaatatgtacagtatggagtatgtacagttcctttacatactccatcagatagtagaagtagtcaacaccttgaacacattcctcctaaaggtaacagtgaccttactactcacagcctaaaaaataggtttatttcacctgtaaattcatctgcctgaatgaaatgtcactgattctttcttaaataaatgtttagtagtatttatatataataggttaaaaatgagtattttttgttttattttataagaaaaatataagttatatacatttttttcctcctcagaacctaaaaataaaatatgtgtttatgacaagttacacatcaaaacccatcttgatgaagaaactggagaaaagacatctatcacacttgatgttgggcctgagtcctttaaccctggagatggcccaggaggattacctatacaaagaacagatgacacccaagaacattttccccacagggtcagtgaccctagtggtgagcaaaagcagaagctgccaagcagaagaaagaagcagcagaagaggacatttatttcacaggagagagactgtgtctttggcactgattcactcagattgtctgggaaaagactaaaggaacaggaagaaatcagtagcaaaaatcctgctagatcaccagtaactgaaataagaactcaccttttaagtcttaaatctgaacttccagattctccagaaccagttacagaaattaatgaagacagtgtattaattccaccaactgcccaaccagaaaaaggtgttgatacattcctaagaagacctaatttcaccagggcgactacagttcctttacagactctatcagatagcggtagtagtcagcaccttgaacacattcctcctaaaggtagcagtgaacttactactcacgacctaaaaaacattagatttacttcacctgtaagtttggaggcacaaggcaaaaaaatgactgtctctacagataacctccttgtaaataaagctataagtaaaagtggccaactgcccacaagttctaatttagaggcaaatatttcatgttctctaaatgaactcacctacaataacttaccagcaaatgaaaaccaaaacttaaaagaacaaaatcaaacagagaaatctttaaaatctcccagtgacactcttgatggcaggaatgaaaatcttcaggaaagtgagattctaagtcaacctaagagtcttagcctggaagcaacctctcctctttctgcagaaaaacattcttgcacagtgcctgaaggccttctgtttcctgcagaatattatgttagaacaacacgaagcatgtccaattgccagaggaaagtagccgtggaggctgtcattcagagtcatttggatgtcaagaaaaaagggtttaaaaataaaaataaggatgcaagtaaaaatttaaacctttccaatgaggaaactgaccaaagtgaaattaggatgtctggcacatgcacaggacaaccaagttcaagaacctctcagaaacttctctcattaactaaagtcagctctcccgctgggcccactgaagataatgacttgtctaggaaggcagttgcccaagcacctggtagaagatacacaggaaaaagaaaatcagcctgcaccccagcatcagatcattgtgaaccacttttgccaacttctagcctgtcgattgttaacaggtccaaggaagaagtcacctcacacaaatatcagcacgaaaaattatttattcaagtgaaaggtaaatcaagatgtgtttgatgatgatgatgatgatgatgaaagttaacaattactatttgcctggcacttccttttctttcttttctaaaaagtgacagggccaagtgtggtggcttacgtctgtaatcccagcactttgggaggctgaggaacagagtgagaccctggctcaaaaaaatttaaataaataaataaataaataaataaataaataaataaaaataaagagacaggggctcactgttgtccaggctggagtgccgtggtgcagcctctatctcctgggctcaaatgttcctcctgcctcagcctcccaactagctgggactactggcatgtaccaccatgcctggctaatgttttaaaattttttgtagaggtgaggtcctgccctgttgcccaggctgatcttgaactcctggcctcaaacaatcctcccaccacagcctctcaaagtgctgggattacagacgtgagccactgtgtccagcttgcctg

SEQ ID NO: 550 - DNA, 1830 bp, Homo sapiens
atttttatttatttatttattgtttttaaagacagtctcactgtgttgcccaggctggtctggaactcctgggctcaagcaattctcttaccttgacctctgaaagtactaggattacagctgtgagctaccatacctggctagcaatacactgttttgggtagtgcagaaaaatagctgctaattaatcaactaactcatgaccgttgtttgaacccttcgcccaagtttctgagtcatggatgggaaaagtaatgaacattttttagtatatttgagtttagaagctcactctttgttgggtattacatttaagaatggtttaacatgtttctttgataggacttcattgtaaacattaagttcattctggggaaattaaggttcattaaaatgtttcttttaaatctaggagatcctattctctttgtcatcagtgaaacagattgtctgttttgttgggttttgttactattttgtgacttatttttcttctttagggaagaaaagtcgtcatcaaaaagaggattccctttcttggagtaatagtgcttatttatccttggatgatgatgctttcacggctccatttcatagggatggaatgctgagtttaaagcaactactgtcttttctcagtatcacagactttcagttacctgatgaagactttggacctcttaagcttgaaaaagtgaagtcctgctcagaaaaaccagtggagccctttgagtcaaaaatgtttggagagagacatcttaaagagggaagctgtatttttccagaggaactgagtcctaaacgcatggatacagaaatggaggacttagaagaggaccttattgttctaccaggaaaatcacatcccaaaaggccaaactcgcaaagccagcatacaaagacgggcctttcttcatccatattactttatactcctttaaatacggttgcgcctgatgataatgacaggcctaccacagacatgtgttcacctgctttccccatcttaggtactactccagcctttggccctcaaggctcctatgaaaaagcatctacagaagttgctggacgaacttgctgcacaccccaacttgctcatttgaaagactcagtctgtcttgccagtgatactaaacaattcgacagttcaggcagcccagcaaaaccacataccaccctgcaagtgtcaggcaggcaaggacaacctacctgtgactgtgactctgtcccgccaggaacacctccacccattgagtcattcacttttaaagaaaatcagctctgtagaaacacatgccaggagctgcataaacattccgtcgaacaggtacaatccatttcctctgtgaaattttctctgaaggaatgaaatgccttagtgaatgtaaacagcatgacttgcttgcgcattgggccttccacgtttaagaatggtttgacgtgtttctttgatatgatttcattgtaatcattaagttcattctggggaaattaaggttcattaaaatgtttcttttaaatatgggaggtcctattctctttgttatcagtgaaacagtttgcatttggagctttgctgctgttataagaggaaataaagacaatacgaagtagacattttgatgagtgggtaatgcaggcagacattatacataaagtgtagactaatgatgtgacttttgttttcacagactgaaacagcagagcttcctgcttctgatagcataaacccaggcaacctacaattggtttcagagttaaaggtcagaagaatattctcttccagtgtctcgtgtcttacatatgaaaactttaatgaactgaaaa

SEQ ID NO: 551 - DNA, 1072 bp, Homo sapiens
caggcaaggacaacctacctgtgactgtgactctgtcccgccaggaacacctccacccattgagtcattcacttttaaagaaaatcagctctgtagaaacacatgccaggagctgcataaacattccgtcgaacaggtacaatccatttcctctgtgaaattttctctgaaggaatgaaatgccttagtgaatgtaaacagcatgacttgcttgcgcattgggccttccacgtttaagaatggtttgacgtgtttctttgatatgatttcattgtaatcattaagttcattctggggaaattaaggttcattaaaatgtttcttttaaatatgggaggtcctattctctttgttatcagtgaaacagtttgcatttggagctttgctgctgttataagaggaaataaagacaatacgaagtagacattttgatgagtgggtaatgcaggcagacattatacataaagtgtagactaatgatgtgacttttgttttcacagactgaaacagcagagcttcctgcttctgatagcataaacccaggcaacctacaattggtttcagagttaaaggtcagaagaatattctcttccagtgtctcgtgtcttacatatgaaaactttaatgaactgaaaagaattcagtcatatagcttcttgttctttaatactattaaagatattggtaaacagattcagaaaaacagatttggattggttatttttcccaatatttacctctgtttatgttttgagctctcctcttaaagtttctatgccaacctattggcaagaacaacttaggctaagtaactgaacttcatgtctaaatctaagttagggagctgggcacggtggctcacccctataatctcagcactttgggaggctgaagcgggctgatcacttgaggtcagatgtttgaggccagcctggccaacatgatgaaaccccatctctactaaaaatacaaaaattagccgggcgtggtggtgggcgcctataatcccagctgctagggaggctgagggaagagaatacttgaactgggagacagacgttgcagtgagcca

SEQ ID NO: 552 - DNA, 1162 bp, Homo sapiens
tgtaaccccagcactttgggaggccgaggtgggtggatcacttgaggtcaggagttcaagaccagcctggccaaatggtgaaaccttgtctctactaaaaatacaaaaattagctgggtgtggtggcgggcgcctgtaatcctagctactcggaaggctgaggcaggagaatcgcttgaacccgggaggcgaaggttgcagtaagccgagattgcaccactgcactccagcctgggtgataaagtgagactcagtcccaaaaacacccaaaaattaaaattaataaaataaataaaaaataaaatctttcatgatgtaagtttgataggcatttttttaggtacataagaaccacaaagctctttcttttcacctgcataagacttaaattttacatacctactgtttcattgaattataattcatcactttgcatacttatgctttgcataaaacagcactcgagtgccactttaacagaactgttgccattgtgtcagaatccttcaggttcctgttccgtagatgtgagtgccatgttttgggaaagagccggttgtaaagagccatgtatcataactgcttgcgaagatgtagtttctctttggaaagctctggatgcttggcagtgggaaaaactttatacctggcacttcgcagaggtaagtgggaatctcgagctgaaagagatctttgcagccatttgcctgataatgtagatgggcagcttaccaaaattgggagctatgaccatgcaaggcagaacagagatgaggtttttttcccaacattttattatgaaaagtttcaaacatccagaaaagttgtatagtgagcacccatatacccaccattctagactctaccattaacatcctgctttgttcgctttatcacaaatttttgtttgtttgtttgagacagggtctcactctgtcatgcaggctggagtgcagtggcatgatcacggctcactgcagtttcaacctccccaggctcagtaatcctctcacctcaccctcccaagtagctgggaccacaggcatgcaccaccatgtctggctaattttttattgtatttttttcttcttctttttattgagatggagtcctgctctgtcacccaggctggagtgcagtggcatgatctcggctcactgtc

SEQ ID NO: 553 - DNA, 1086 bp, Homo sapiens
ttgcaatgagctgagattgtgccattgcactcaaggctgggcaacaagagtgaaactccgactcaaaaaaaaaaatttccttgttcctgtagagtcttcatacttgaatatacctcattcttgctctccaaatatatacaacatctaacactgtgctttacacagaggtgcccaataaatatttgttcagtgaacatagatatacttttaaatggctgcataaatattctttacattcacatgccaaaatatacccaattattcccctattgttagaattataccttgcattaggtaaatgctcagtaagcactattatgctattatgcatatagtttatttagatttacagctaataaaaagagttttctgagccttcaaatgatgaaaattatccttgtacagtgagaatacaaaagaatgtgataaattttggaaaatctggattaaacaaaaatgaaacaaccaagcataatttttggctgctttgttttatttaggttccagtattacagatagttccagtgcctgatgtgtataatctcgtgtgtgtagctttgggaaatttggaaatcagagagatcaggtatgtaattcccaaggagtgatttgtttttccttcatctttgtctctgtcagctggttttaagtgcaggtaataacctaggcttgagtcttgaaagaatctgaaagatctaaagagagagagatttgtttaaaaaaaaatcaatagaatgacatccctgactgaagtttctatttaaaatgtgaacctaggctgggcgcagtggctcacgcctgtaatcccagcactttgggaggccaaggaaggtggatcaactgaggtcaggagtttgagaccagcctggccaacatggtgaaactgtgtctctactgaaaatacaaaaattagcctggtgtatagcacctgcgggtgcctataatcccagctactcaggaggctgaggcaggagaattgcctgaacccgggaaacagaggttgcagtgagctaagatcgtgccaccactgcattccttctggatgacagagtgagactttgtctcaaaaaaaaaaaaaaaaaaaaa

SEQ ID NO: 554 - DNA, 1162 bp, Homo sapiens
gaggcaggagaattgcctgaacccgggaaacagaggttgcagtgagctaagatcgtgccaccactgcattccttctggatgacagagtgagactttgtctcaaaaaaaaaaaaaaaaaaaaaaaaaaaaggccgggtatggtggctcacacctgtaatcccagcactttgggaggccgaggcaggtggatcacgaggtcaggagttcgagaccagcctgaccaacatggtgaaaccccgtctctacaaaaatacagaaaaattagccaggtgtggtggtgcgcacctataatcccagctactcaggaggctgaggcaggacagtcgcttgaacctgggaggcagagttgcagtgagccaagattgtgccactgcactccagcctaggcgacagagcaagactctgtctcaaaaaaaaaaaaaaaaaaaaagtgaacctagtcctttaatattaaaaggttactcctcacatcaccccatttttccttatatttggcttagggcattgttttgttcctctgatgatgaaagtgaaaagcaagtactactgaagtctggaaatataaaagctgtgcttggcctgacaaagaggaggctagttagtagcagtgggaccctttctgatcaacaagtagaagtcatgacgtttgcagaagatggagggtaagaaaagcattgattgatttttaactattagatgaagaatgattttatcacaggtttcagagaaagttgggtaactaggatctcgtttttctgtgctgggggtgtaatataagcatgtaccgcatcaacactaggttatgacatagaagcaggttagtgaggtggaagccagacatgtcagggatgaagtcaaagaaggtgagaggctcagcaaatgtagtttgttcttcagtcttcttgaaatctgtgtgtcccttaaatgttagaaatacctctgctgggcacagtggctcatgcccataatcccagccctttgggaggccaaggcagaagtttgagcccaggagttcaagaccagttggggccacatagcagggccccatctttacaaaaaatttaaaaattagctgggtgtggcagagcatgccttgtggtcccagctactagggagtctgaggtggaaggatcacttgagctcaggagttcaagggtgcagt

SEQ ID NO: 555 - DNA, 1117 bp, Homo sapiens
gcagacagatttctgagagatgagaagataaaattactgggacttggtgattgactagattgagaggaaggagagaatatcaacatggtagggttggtcacttgagtggtgaccaagctcgaaatgtgggtattatccttgtctccttccccccagtctaggtggtcacttgagtggtgaccaaccctgaaacttggacattagatggtgatgcaattcattgagataggaatgcagaaagaaacaaaaggtttatagaaaaagttaacaagtttaattttgaatataatgaattcgaggtgcttgcagcatatctaggtagatattatgaaagtaatatatgttcattgtagaaagtttagtatacacgttttctgggttagatttttttttcctgatattaggttagtttatattatgcagttcaacaatgcggagaagggctacctagagactgctttagtgcaaagtactgacttttcatactgttttaattacagaggcaaagaaaaccaatttttgatgccccctgaggagactatactaacttttgctgaggtccaagggatgcaagaagctctgcttggtactactattatgaacaacattgttatttggtaagctttccctctaggtcctcagttccctcatctgtagtatgaggatatacctctaattttacagggttgttgtgaagattaaataagagagtatgtgtaaacatgattgtggttttgtgttgctgttgttgttgtttttgttgtgttttgagacagagtctcctcctatcacccaggtgggagtacagtggtatgatctcggctcactgcaacctctgcctcctggattcaagtgattctcctgcctcagcctcccgagtagctgggattataggcatgtgccaccacacccagctaatttttgtattttttagtagagatagggtttcatcatgttggccaggttggtcttgaactcctggcctcaagtgatccacctgcctcagactcccaaaatgcagggattacaggagtgagccaccgtgcctggctaatttttgtattttttagtagagaagggattttgccatgttggctaggttggtcttgaactcctg

SEQ ID NO: 556 - DNA, 1088 bp, Homo sapiens
ctcttcctaccccacttcaatccttccttctatccattattttggtctagttgtagtataaatacatgtaatagagatataattgtaactctcttttaggtgtagtctcttgccctacaaaatttggtttcctggccgttgtcttccatggaaaatttagacataacaagaagtgtcacaaaatcatgatactgctataccatgtgcctgatttcaataccaggttgaatgagatgatggaaccttcctcatggaatttggagagatttatccctaggggcattgtagatttaatctaaggctgaactatcaaatgaaactattggcaaaattaacccacagttctacttttacctaaatctatgactaaagaaaactaaggagctcttagttttttccctggtcacctcctaagacatgctatgatgaataagaaaatattttctgaatactggtttgttggaagaatgtgatcagcttatttatttttgttatctaaggaatttaaaaactggtcaactcctgaaaaagatgcacattgatgattcttaccaagcttcagtctgtcacaaagcctattctgaaatggtaagtaatgactggctgggaccactttgtgtgttactgttggtctcattaagtgagagcagtaagtcataagcagtaatgaacaaaccttccccgtggcatcttttttcaaaattggatagcaatgtttgtcctttcttgaaatttaggatgaaaataagtgttggtacagtgattgcttggtaaattttctggctgtaggacctgagggcaaatatttatttctagctgtggatttgaactgagaactattatgcctgttatcagacttgactcccagccacattgccatgtttaagtagccttaggaaggatgattaaatgatccaataatcccagaaatacttttttttttttttgggatggagttttgctcttgttgcccaggctggagtgcaatggcgcgatctcagctcactgcaacctctgccttctaggttcaattaattgtcctgcctcagtcttccaagtagctgggattacaggtgcccgccaccaca

SEQ ID NO: 557 - DNA, 1149 bp, Homo sapiens
tgtcctcattctctctttgccaatatttccccaaatgaatggcatgaaatgtagtactatctaaggggaaggaaatggatgaatcagattcatgcctggcaagactggctaaaacaaacactgggaaccggaagcaggagaagctaaagctagaagttggctgagcgcggtggctgacgtctgtaatcccaacactttgggaggctgaggtgggaggatcccttgaggccaggtgttcaacaacagcctgggtaacacaggaaggccttgtctctaaaaaaaaaaagaagaagaacaagaagccagaagtccagtccagtaataatctcaacagttcctagacggcagggaaaaaaatcaagccagtggttaaatcctggatacttcagagcctatcggtcattgctttaattgtttggtttttgtctctgccagatctttatttttcctgacatactcttgacagtctatttgggatatttatttttctccgaaattaggggcttctctttattgtcctgagtcatccctgtgccaaagagagtgagtcgttgcgaagccctgtgtttcagctcattgtgattaaccctaagacgactctcagcgtgggtgtgatgctgtactgtcttcctccagggcaggctggcaggcaagtgtgcataactgctactctatgggtgggacattctgaaaggcactgtgcaaacacaaaaactagatatttttgtgtcacttagaagaatggaaaacatgaaatactatatatcatgataggaatattcagaagtaggatgaagattagtggacttgagtcaaaccccagattccctgcatcctgatctctactagtatggggttatataggtttttaatagtgtttattcaagccctgttttttcccctaaggtaaatattttggcagcacatggtggatcatgcctgtaatcccagcactttgggaggtcaaggtgggaggagagcttgagcccaggagtttgagaccaacttggacaacagagcaagacccagtctctaccaaaaaaaatatatatatatattagccaaacatgctggcatgcatctgtacttccagctactcgggaggctgaggtgggaggatggcttgaacctgggaggtggaggctgcag

SEQ ID NO: 558 - DNA, 1508 bp, Homo sapiens
aatagtgaaaagtgcaatgaagataaaaacatatatgtcataaagatggaacagatcccgtatgtgtgtgcacactgcctgagatagaggattaggggtgacctttctatggacataacaggcctgaatgatgacaagaactcagccatgctaagagctggggtgagagcctgtcagggagaaagaatggcaagagcagtgacactgagttgggactgagtttggccagagtgatggagagtggaaggaaggccactgtgcgccagccttcaattgctacaagatgcatcagagagattggcaggaactggacatgtgattctgtccaaaactgcaacacaatagccaacagacctctaaggctacaaatgtaggcattcatagttacagggatttttgttcctgttgctggttttgggaacatggttttgaccttttttttttttttaattgttttttggatatgtaatctgaattatatcttctttgtatgctatcaggttcctggaaggtgacgtgaaagatcactgtgcagcagcaatcttgacttctggaacaattgccatttgggacttacttctcggtcagtgtactgccctcctcccacctgtctctgaccaacattggtcttttgtgaaatggtcgggtacagactctcatttgctggctggacaaaaagatggaaatatatttgtataccactattcataagttagggtaaagtgaaaacacaattttctggatatattgggcctcttagtattttttggagttttaaatataaaggagaatatctgaatgacacttaaaatgattgcttgtttatgtccagacagacttattttttattctaatgatggtagcaccactgatcttggatgtacatttatgtatactttgagaaaaagggttttaggttgatttttgtaatttcccacatttgtacatgtgcttttaaaggtgtacataaagcttcaaatggcaataaatatttatttttatacattctgcttggcatgttattgtttcccattctttcaagatcatttgcagaagcaagaactaattattatacaaccaggatatttaatcaatagtctttgcctagtaagtgtaaatttcagttcagttaacttactacactaatatgcaatatactttttgtgctatttgtaatactttatttttacatacatactaaaataaaatgaaacctactaaaatatcctaatttagggatactcttactctttttcattctcatgcatctttcatgccagtgctgcattatcactagagtcacctttttttgagatggagcctcactggtcacccaggcgggagtgcagtggcatgatctcggctcattgcaacctctgcctcccaggttaagtgattcccctgcttcagcctctcaagtagctgggattacaggcacccaccaccacacctggctaatttttgtattttaatagagatgggggtctcaccatgttggtcaggcaggc

SEQ ID NO: 559 - DNA, 1500 bp, Homo sapiens
aaggtgacgtgaaagatcactgtgcagcagcaatcttgacttctggaacaattgccatttgggacttacttctcggtcagtgtactgccctcctcccacctgtctctgaccaacattggtcttttgtgaaatggtcgggtacagactctcatttgctggctggacaaaaagatggaaatatatttgtataccactattcataagttagggtaaagtgaaaacacaattttctggatatattgggcctcttagtattttttggagttttaaatataaaggagaatatctgaatgacacttaaaatgattgcttgtttatgtccagacagacttattttttattctaatgatggtagcaccactgatcttggatgtacatttatgtatactttgagaaaaagggttttaggttgatttttgtaatttcccacatttgtacatgtgcttttaaaggtgtacataaagcttcaaatggcaataaatatttatttttatacattctgcttggcatgttattgtttcccattctttcaagatcatttgcagaagcaagaactaattattatacaaccaggatatttaatcaatagtctttgcctagtaagtgtaaatttcagttcagttaacttactacactaatatgcaatatactttttgtgctatttgtaatactttatttttacatacatactaaaataaaatgaaacctactaaaatatcctaatttagggatactcttactctttttcattctcatgcatctttcatgccagtgctgcattatcactagagtcacctttttttgagatggagcctcactggtcacccaggcgggagtgcagtggcatgatctcggctcattgcaacctctgcctcccaggttaagtgattcccctgcttcagcctctcaagtagctgggattacaggcacccaccaccacacctggctaatttttgtattttaatagagatgggggtctcaccatgttggtcaggcaggccttgaactcctgacctcaagtgatccacctgctttgacctcccaaagtgctgggattacaggcatgaaccactgccgctcttttttttcttggttttttgttttttgttttttttttagaacggagtctccctctatcacccaggctagagtgcagtggggtgatctgggctcactgcaacctccgcctcccaggttcaagtgattctcatgcctcagcctcctgagtagctgggattacaggcatgctctactatacccggctaatttttatattgtttgtagagacagggtttcactgtgttggccaggctagtctggaactcctgaccttaggtgatctgcctacgtcggcctcccaaagtactgggattacagggatgagctaccgtgcccagccaaagaagattatattttttaaagacaaatttttgggccgggcgcagtggatcacgcctgtaatcccagcactttgggaggccaaggtgggcagatcactag

SEQ ID NO: 560 - DNA, 3724 bp, Homo sapiens
tctccctcggcgccgccgccgccgcccgcggggctgggacccgatgcggttagagccgcggagcctggaagagccccgagcgtttctgctttgggacaaccatacatctaattccttaaagtagttttatatgtaaaacttgcaaagaatcagaacaatgcctccacgaccatcatcaggtgaactgtggggcatccacttgatgcccccaagaatcctagtagaatgtttactaccaaatggaatgatagtgactttagaatgcctccgtgaggctacattaataaccataaagcatgaactatttaaagaagcaagaaaataccccctccatcaacttcttcaagatgaatcttcttacattttcgtaagtgttactcaagaagcagaaagggaagaattttttgatgaaacaagacgactttgtgaccttcggctttttcaaccctttttaaaagtaattgaaccagtaggcaaccgtgaagaaaagatcctcaatcgagaaattggttttgctatcggcatgccagtgtgtgaatttgatatggttaaagatccagaagtacaggacttccgaagaaatattctgaacgtttgtaaagaagctgtggatcttagggacctcaattcacctcatagtagagcaatgtatgtctatcctccaaatgtagaatcttcaccagaattgccaaagcacatatataataaattagataaagggcaaataatagtggtgatctgggtaatagtttctccaaataatgacaagcagaagtatactctgaaaatcaaccatgactgtgtaccagaacaagtaattgctgaagcaatcaggaaaaaaactcgaagtatgttgctatcctctgaacaactaaaactctgtgttttagaatatcagggcaagtatattttaaaagtgtgtggatgtgatgaatacttcctagaaaaatatcctctgagtcagtataagtatataagaagctgtataatgcttgggaggatgcccaatttgatgttgatggctaaagaaagcctttattctcaactgccaatggactgttttacaatgccatcttattccagacgcatttccacagctacaccatatatgaatggagaaacatctacaaaatccctttgggttataaatagtgcactcagaataaaaattctttgtgcaacctacgtgaatgtaaatattcgagacattgataagatctatgttcgaacaggtatctaccatggaggagaacccttatgtgacaatgtgaacactcaaagagtaccttgttccaatcccaggtggaatgaatggctgaattatgatatatacattcctgatcttcctcgtgctgctcgactttgcctttccatttgctctgttaaaggccgaaagggtgctaaagaggaacactgtccattggcatggggaaatataaacttgtttgattacacagacactctagtatctggaaaaatggctttgaatctttggccagtacctcatggattagaagatttgctgaaccctattggtgttactggatcaaatccaaataaagaaactccatgcttagagttggagtttgactggttcagcagtgtggtaaagttcccagatatgtcagtgattgaagagcatgccaattggtctgtatcccgagaagcaggatttagctattcccacgcaggactgagtaacagactagctagagacaatgaattaagggaaaatgacaaagaacagctcaaagcaatttctacacgagatcctctctctgaaatcactgagcaggagaaagattttctatggagtcacagacactattgtgtaactatccccgaaattctacccaaattgcttctgtctgttaaatggaattctagagatgaagtagcccagatgtattgcttggtaaaagattggcctccaatcaaacctgaacaggctatggaacttctggactgtaattacccagatcctatggttcgaggttttgctgttcggtgcttggaaaaatatttaacagatgacaaactttctcagtatttaattcagctagtacaggtcctaaaatatgaacaatatttggataacttgcttgtgagatttttactgaagaaagcattgactaatcaaaggattgggcactttttcttttggcatttaaaatctgagatgcacaataaaacagttagccagaggtttggcctgcttttggagtcctattgtcgtgcatgtgggatgtatttgaagcacctgaataggcaagtcgaggcaatggaaaagctcattaacttaactgacattctcaaacaggagaagaaggatgaaacacaaaaggtacagatgaagtttttagttgagcaaatgaggcgaccagatttcatggatgctctacagggctttctgtctcctctaaaccctgctcatcaactaggaaacctcaggcttgaagagtgtcgaattatgtcctctgcaaaaaggccactgtggttgaattgggagaacccagacatcatgtcagagttactgtttcagaacaatgagatcatctttaaaaatggggatgatttacggcaagatatgctaacacttcaaattattcgtattatggaaaatatctggcaaaatcaaggtcttgatcttcgaatgttaccttatggttgtctgtcaatcggtgactgtgtgggacttattgaggtggtgcgaaattctcacactattatgcaaattcagtgcaaaggcggcttgaaaggtgcactgcagttcaacagccacacactacatcagtggctcaaagacaagaacaaaggagaaatatatgatgcagccattgacctgtttacacgttcatgtgctggatactgtgtagctaccttcattttgggaattggagatcgtcacaatagtaacatcatggtgaaagacgatggacaactgtttcatatagattttggacactttttggatcacaagaagaaaaaatttggttataaacgagaacgtgtgccatttgttttgacacaggatttcttaatagtgattagtaaaggagcccaagaatgcacaaagacaagagaatttgagaggtttcaggagatgtgttacaaggcttatctagctattcgacagcatgccaatctcttcataaatcttttctcaatgatgcttggctctggaatgccagaactacaatcttttgatgacattgcatacattcgaaagaccctagccttagataaaactgagcaagaggctttggagtatttcatgaaacaaatgaatgatgcacatcatggtggctggacaacaaaaatggattggatcttccacacaattaaacagcatgcattgaactgaaaagataactgagaaaatgaaagctcactctggattccacactgcactgttaataactctcagcaggcaaagaccgattgcataggaattgcacaatccatgaacagcattagaatttacagcaagaacagaaataaaatactatataatttaaataatgtaaacgcaaacagggtttgatagcacttaaactagttcatttcaaaattaagctttagaataatgcgcaatttcatgttatgccttaagtccaaaaaggtaaactttgaagattgtttgtatctttttttaaaaaacaaaacaaaacaaaaatccccaaaatatatagaaatgatggagaaggaaaaaaaaaaaaaaaaa

SEQ ID NO: 561 - DNA, 3538 bp, Homo sapiens
ggcaagacaacgaggatttgcgtagggggcgagcctctgaggccacttggctcttacggccacgcagggcgccgcagatgcagccggagcccgcttttccctctcaggacgacccctaggccgccagcagttccctaccgacgaaggcgactgtacagcgtccaccgcgttcgtgcccacttacccgccgccccactccgggccgccggctcgcagcaggaccagcccggctgctacggccgcggatacacgccctcaggcccggcgctgcgcagcttgcggaagctttcccggacagactcgctgccagcggattggctgcgagcagcgccaatctcacgttgcccccgggcgaggcgggactcagtgccgcgctctctgcacccgctctgccgcgcgcgtgcgtgctgggtgcgggtgcgggtgcggggttgggcctgcgcatcgggtgagacgctggctgcttgcggctagtggatggtaattgcctgcctcgcgctagcaggaagctgctctgttaaaagcgaaaatgaaacaattgcctgcggcaacagttcgactcctttcaagttctcagatcatcacttcggtggtcagtgttgtaaaagagcttattgaaaactccttggatgctggtgccacaagcgtagatgttaaactggagaactatggatttgataaaattgaggtgcgagataacggggagggtatcaaggctgttgatgcacctgtaatggcaatgaagtactacacctcaaaaataaatagtcatgaagatcttgaaaatttgacaacttacggttttcgtggagaagccttggggtcaatttgttgtatagctgaggttttaattacaacaagaacggctgctgataattttagcacccagtatgttttagatggcagtggccacatactttctcagaaaccttcacatcttggtcaaggtacaactgtaactgctttaagattatttaagaatctacctgtaagaaagcagttttactcaactgcaaaaaaatgtaaagatgaaataaaaaagatccaagatctcctcatgagctttggtatccttaaacctgacttaaggattgtctttgtacataacaaggcagttatttggcagaaaagcagagtatcagatcacaagatggctctcatgtcagttctggggactgctgttatgaacaatatggaatcctttcagtaccactctgaagaatctcagatttatctcagtggatttcttccaaagtgtgatgcagaccactctttcactagtctttcaacaccagaaagaagtttcatcttcataaacagtcgaccagtacatcaaaaagatatcttaaagttaatccgacatcattacaatctgaaatgcctaaaggaatctactcgtttgtatcctgttttctttctgaaaatcgatgttcctacagctgatgttgatgtaaatttaacaccagataaaagccaagtattattacaaaataaggaatctgttttaattgctcttgaaaatctgatgacgacttgttatggaccattacctagtacaaattcttatgaaaataataaaacagatgtttccgcagctgacatcgttcttagtaaaacagcagaaacagatgtgctttttaataaagtggaatcatctggaaagaattattcaaatgttgatacttcagtcattccattccaaaatgatatgcataatgatgaatctggaaaaaacactgatgattgtttaaatcaccagataagtattggtgactttggttatggtcattgtagtagtgaaatttctaacattgataaaaacactaagaatgcatttcaggacatttcaatgagtaatgtatcatgggagaactctcagacggaatatagtaaaacttgttttataagttccgttaagcacacccagtcagaaaatggcaataaagaccatatagatgagagtggggaaaatgaggaagaagcaggtcttgaaaactcttcggaaatttctgcagatgagtggagcaggggaaatatacttaaaaattcagtgggagagaatattgaacctgtgaaaattttagtgcctgaaaaaagtttaccatgtaaagtaagtaataataattatccaatccctgaacaaatgaatcttaatgaagattcatgtaacaaaaaatcaaatgtaatagataataaatctggaaaagttacagcttatgatttacttagcaatcgagtaatcaagaaacccatgtcagcaagtgctctttttgttcaagatcatcgtcctcagtttctcatagaaaatcctaagactagtttagaggatgcaacactacaaattgaagaactgtggaagacattgagtgaagaggaaaaactgaaatatgaagagaaggctactaaagacttggaacgatacaatagtcaaatgaagagagccattgaacaggagtcacaaatgtcactaaaagatggcagaaaaaagataaaacccaccagcgcatggaatttggcccagaagcacaagttaaaaacctcattatctaatcaaccaaaacttgatgaactccttcagtcccaaattgaaaaaagaaggagtcaaaatattaaaatggtacagatccccttttctatgaaaaacttaaaaataaattttaagaaacaaaacaaagttgacttagaagagaaggatgaaccttgcttgatccacaatctcaggtttcctgatgcatggctaatgacatccaaaacagaggtaatgttattaaatccatatagagtagaagaagccctgctatttaaaagacttcttgagaatcataaacttcctgcagagccactggaaaagccaattatgttaacagagagtctttttaatggatctcattatttagacgttttatataaaatgacagcagatgaccaaagatacagtggatcaacttacctgtctgatcctcgtcttacagcgaatggtttcaagataaaattgataccaggagtttcaattactgaaaattacttggaaatagaaggaatggctaattgtctcccattctatggagtagcagatttaaaagaaattcttaatgctatattaaacagaaatgcaaaggaagtttatgaatgtagacctcgcaaagtgataagttatttagagggagaagcagtgcgtctatccagacaattacccatgtacttatcaaaagaggacatccaagacattatctacagaatgaagcaccagtttggaaatgaaattaaagagtgtgttcatggtcgcccattttttcatcatttaacctatcttccagaaactacatgattaaatatgtttaagaagattagttaccattgaaattggttctgtcataaaacagcatgagtctggttttaaattatctttgtattatgtgtcacatggttattttttaaatgaggattcactgacttgtttttatattgaaaaaagttccacgtattgtagaaaacgtaaataaactaatatagactattcaaaaaaaaaaaaaaaaaa

SEQ ID NO: 562 - DNA, 3421 bp, Homo sapiens
ggcaagacaacgaggatttgcgtagggggcgagcctctgaggccacttggctcttacggccacgcagggcgccgcagatgcagccggagcccgcttttccctctcaggacgacccctaggccgccagcagttccctaccgacgaaggcgactgtacagcgtccaccgcgttcgtgcccacttacccgccgccccactccgggccgccggctcgcagcaggaccagcccggctgctacggccgcggatacacgccctcaggcccggcgctgcgcagcttgcggaagctttcccggacagactcgctgccagcggattggctgcgagcagcgccaatctcacgttgcccccgggcgaggcgggactcagtgccgcgctctctgcacccgctctgccgcgcgcgtgcgtgctgggtgcgggtgcgggtgcggggttgggcctgcgcatcgggtgagacgctggctgcttgcggctagtggatggtaattgcctgcctcgcgctagcaggaagctgctctgttaaaagcgaaaatgaaacaattgcctgcggcaacagttcgactcctttcaagttctcagatcatcacttcggtggtcagtgttgtaaaagagcttattgaaaactccttggatgctggtgccacaagcgtagatgttaaactggagaactatggatttgataaaattgaggtgcgagataacggggagggtatcaaggctgttgatgcacctgtaatggcaatgaagtactacacctcaaaaataaatagtcatgaagatcttgaaaatttgacaacttacggttttcgtggagaagccttggggtcaatttgttgtatagctgaggttttaattacaacaagaacggctgctgataattttagcacccagtatgttttagatggcagtggccacatactttctcagaaaccttcacatcttggtcaaggtacaactgtaactgctttaagattatttaagaatctacctgtaagaaagcagttttactcaactgcaaaaaaatgtaaagatgaaataaaaaagatccaagatctcctcatgagctttggtatccttaaacctgacttaaggattgtctttgtacataacaagatttatctcagtggatttcttccaaagtgtgatgcagaccactctttcactagtctttcaacaccagaaagaagtttcatcttcataaacagtcgaccagtacatcaaaaagatatcttaaagttaatccgacatcattacaatctgaaatgcctaaaggaatctactcgtttgtatcctgttttctttctgaaaatcgatgttcctacagctgatgttgatgtaaatttaacaccagataaaagccaagtattattacaaaataaggaatctgttttaattgctcttgaaaatctgatgacgacttgttatggaccattacctagtacaaattcttatgaaaataataaaacagatgtttccgcagctgacatcgttcttagtaaaacagcagaaacagatgtgctttttaataaagtggaatcatctggaaagaattattcaaatgttgatacttcagtcattccattccaaaatgatatgcataatgatgaatctggaaaaaacactgatgattgtttaaatcaccagataagtattggtgactttggttatggtcattgtagtagtgaaatttctaacattgataaaaacactaagaatgcatttcaggacatttcaatgagtaatgtatcatgggagaactctcagacggaatatagtaaaacttgttttataagttccgttaagcacacccagtcagaaaatggcaataaagaccatatagatgagagtggggaaaatgaggaagaagcaggtcttgaaaactcttcggaaatttctgcagatgagtggagcaggggaaatatacttaaaaattcagtgggagagaatattgaacctgtgaaaattttagtgcctgaaaaaagtttaccatgtaaagtaagtaataataattatccaatccctgaacaaatgaatcttaatgaagattcatgtaacaaaaaatcaaatgtaatagataataaatctggaaaagttacagcttatgatttacttagcaatcgagtaatcaagaaacccatgtcagcaagtgctctttttgttcaagatcatcgtcctcagtttctcatagaaaatcctaagactagtttagaggatgcaacactacaaattgaagaactgtggaagacattgagtgaagaggaaaaactgaaatatgaagagaaggctactaaagacttggaacgatacaatagtcaaatgaagagagccattgaacaggagtcacaaatgtcactaaaagatggcagaaaaaagataaaacccaccagcgcatggaatttggcccagaagcacaagttaaaaacctcattatctaatcaaccaaaacttgatgaactccttcagtcccaaattgaaaaaagaaggagtcaaaatattaaaatggtacagatccccttttctatgaaaaacttaaaaataaattttaagaaacaaaacaaagttgacttagaagagaaggatgaaccttgcttgatccacaatctcaggtttcctgatgcatggctaatgacatccaaaacagaggtaatgttattaaatccatatagagtagaagaagccctgctatttaaaagacttcttgagaatcataaacttcctgcagagccactggaaaagccaattatgttaacagagagtctttttaatggatctcattatttagacgttttatataaaatgacagcagatgaccaaagatacagtggatcaacttacctgtctgatcctcgtcttacagcgaatggtttcaagataaaattgataccaggagtttcaattactgaaaattacttggaaatagaaggaatggctaattgtctcccattctatggagtagcagatttaaaagaaattcttaatgctatattaaacagaaatgcaaaggaagtttatgaatgtagacctcgcaaagtgataagttatttagagggagaagcagtgcgtctatccagacaattacccatgtacttatcaaaagaggacatccaagacattatctacagaatgaagcaccagtttggaaatgaaattaaagagtgtgttcatggtcgcccattttttcatcatttaacctatcttccagaaactacatgattaaatatgtttaagaagattagttaccattgaaattggttctgtcataaaacagcatgagtctggttttaaattatctttgtattatgtgtcacatggttattttttaaatgaggattcactgacttgtttttatattgaaaaaagttccacgtattgtagaaaacgtaaataaactaatatagactattcaaaaaaaaaaaaaaaaaa

SEQ ID NO: 563 - DNA, 3052 bp, Homo sapiens
ggcaagacaacgaggatttgcgtagggggcgagcctctgaggccacttggctcttacggccacgcagggcgccgcagatgcagccggagcccgcttttccctctcaggacgacccctaggccgccagcagttccctaccgacgaaggcgactgtacagcgtccaccgcgttcgtgcccacttacccgccgccccactccgggccgccggctcgcagcaggaccagcccggctgctacggccgcggatacacgccctcaggcccggcgctgcgcagcttgcggaagctttcccggacagactcgctgccagcggattggctgcgagcagcgccaatctcacgttgcccccgggcgaggcgggactcagtgccgcgctctctgcacccgctctgccgcgcgcgtgcgtgctgggtgcgggtgcgggtgcggggttgggcctgcgcatcgggtgagacgctggctgcttgcggctagtggatggtaattgcctgcctcgcgctagcaggaagctgctctgttaaaagcgaaaatgaaacaattgcctgcggcaacagttcgactcctttcaagttctcagatcatcacttcggtggtcagtgttgtaaaagagcttattgaaaactccttggatgctggtgccacaagcgtagatgttaaactggagaactatggatttgataaaattgaggtgcgagataacggggagggtatcaaggctgttgatgcacctgtaatggcaatgaagtactacacctcaaaaataaatagtcatgaagatcttgaaaatttgacaacttacggttttcgtggagaagccttggggtcaatttgttgtatagctgaggttttaattacaacaagaacggctgctgataattttagcacccagtatgttttagatggcagtggccacatactttctcagaaaccttcacatcttggtcaaggtacaactgtaactgctttaagattatttaagaatctacctgtaagaaagcagttttactcaactgcaaaaaaatgtaaagatgaaataaaaaagatccaagatctcctcatgagctttggtatccttaaacctgacttaaggattgtctttgtacataacaaggcagttatttggcagaaaagcagagtatcagatcacaagatggctctcatgtcagttctggggactgctgttatgaacaatatggaatcctttcagtaccactctgaagaatctcagatttatctcagtggatttcttccaaagtgtgatgcagaccactctttcactagtctttcaacaccagaaagaagtttcatcttcataaacagtcgaccagtacatcaaaaagatatcttaaagttaatccgacatcattacaatctgaaatgcctaaaggaatctactcgtttgtatcctgttttctttctgaaaatcgatgttcctacagctgatgttgatgtaaatttaacaccagataaaagccaagtattattacaaaataaggaatctgttttaattgctcttgaaaatctgatgacgacttgttatggaccattacctagtacaaattcttatgaaaataataaaacagatgtttccgcagctgacatcgttcttagtaaaacagcagaaacagatgtgctttttaataaagtggaatcatctggaaagaattattcaaatgttgatacttcagtcattccattccaaaatgatatgcataatgatgaatctggaaaaaacactgatgattgtttaaatcaccagataagtattggtgactttggttatggtcattgtagtagtgaaatttctaacattgataaaaacactaagaatgcatttcaggacatttcaatgagtaatgtatcatgggagaactctcagacggaatatagtaaaacttgttttataagttccgttaagcacacccagtcagaaaatggcaataaagaccatatagatgagagtggggaaaatgaggaagaagcaggtcttgaaaactcttcggaaatttctgcagatgagtggagcaggggaaatatacttaaaaattcagtgggagagaatattgaacctgtgaaaattttagtgcctgaaaaaagtttaccatgtaaagtaagtaataataattatccaatccctgaacaaatgaatcttaatgaagattcatgtaacaaaaaatcaaatgtaatagataataaatctggaaaagttacagcttatgatttacttagcaatcgagtaatcaagaaacccatgtcagcaagtgctctttttgttcaagatcatcgtcctcagtttctcatagaaaatcctaagactagtttagaggatgcaacactacaaattgaagaactgtggaagacattgagtgaagaggaaaaactgaatctttttaatggatctcattatttagacgttttatataaaatgacagcagatgaccaaagatacagtggatcaacttacctgtctgatcctcgtcttacagcgaatggtttcaagataaaattgataccaggagtttcaattactgaaaattacttggaaatagaaggaatggctaattgtctcccattctatggagtagcagatttaaaagaaattcttaatgctatattaaacagaaatgcaaaggaagtttatgaatgtagacctcgcaaagtgataagttatttagagggagaagcagtgcgtctatccagacaattacccatgtacttatcaaaagaggacatccaagacattatctacagaatgaagcaccagtttggaaatgaaattaaagagtgtgttcatggtcgcccattttttcatcatttaacctatcttccagaaactacatgattaaatatgtttaagaagattagttaccattgaaattggttctgtcataaaacagcatgagtctggttttaaattatctttgtattatgtgtcacatggttattttttaaatgaggattcactgacttgtttttatattgaaaaaagttccacgtattgtagaaaacgtaaataaactaatatagactattcaaaaaaaaaaaaaaaaaa

SEQ ID NO: 564 - DNA, 2851 bp, Homo sapiens
agccaatgggagttcaggaggcggagcgcctgtgggagccctggagggaactttcccagtccccgaggcggatcgggtgttgcatccatggagcgagctgagagctcgagtacagaacctgctaaggccatcaaacctattgatcggaagtcagtccatcagatttgctctgggcaggtggtactgagtctaagcactgcggtaaaggagttagtagaaaacagtctggatgctggtgccactaatattgatctaaagcttaaggactatggagtggatcttattgaagtttcagacaatggatgtggggtagaagaagaaaacttcgaaggcttaactctgaaacatcacacatctaagattcaagagtttgccgacctaactcaggttgaaacttttggctttcggggggaagctctgagctcactttgtgcactgagcgatgtcaccatttctacctgccacgcatcggcgaaggttggaactcgactgatgtttgatcacaatgggaaaattatccagaaaaccccctacccccgccccagagggaccacagtcagcgtgcagcagttattttccacactacctgtgcgccataaggaatttcaaaggaatattaagaaggagtatgccaaaatggtccaggtcttacatgcatactgtatcatttcagcaggcatccgtgtaagttgcaccaatcagcttggacaaggaaaacgacagcctgtggtatgcacaggtggaagccccagcataaaggaaaatatcggctctgtgtttgggcagaagcagttgcaaagcctcattccttttgttcagctgccccctagtgactccgtgtgtgaagagtacggtttgagctgttccgatgctctgcataatcttttttacatctcaggtttcatttcacaatgcacgcatggagttggaaggagttcaacagacagacagtttttctttatcaaccggcggccttgtgacccagcaaaggtctgcagactcgtgaatgaggtctaccacatgtataatcgacaccagtatccatttgttgttcttaacatttctgttgattcagaatgcgttgatatcaatgttactccagataaaaggcaaattttgctacaagaggaaaagcttttgttggcagttttaaagacctctttgataggaatgtttgatagtgatgtcaacaagctaaatgtcagtcagcagccactgctggatgttgaaggtaacttaataaaaatgcatgcagcggatttggaaaagcccatggtagaaaagcaggatcaatccccttcattaaggactggagaagaaaaaaaagacgtgtccatttccagactgcgagaggccttttctcttcgtcacacaacagagaacaagcctcacagcccaaagactccagaaccaagaaggagccctctaggacagaaaaggggtatgctgtcttctagcacttcaggtgccatctctgacaaaggcgtcctgagacctcagaaagaggcagtgagttccagtcacggacccagtgaccctacggacagagcggaggtggagaaggactcggggcacggcagcacttccgtggattctgaggggttcagcatcccagacacgggcagtcactgcagcagcgagtatgcggccagctccccaggggacaggggctcgcaggaacatgtggactctcaggagaaagcgcctgaaactgacgactctttttcagatgtggactgccattcaaaccaggaagataccggatgtaaatttcgagttttgcctcagccaactaatctcgcaaccccaaacacaaagcgttttaaaaaagaagaaattctttccagttctgacatttgtcaaaagttagtaaatactcaggacatgtcagcctctcaggttgatgtagctgtgaaaattaataagaaagttgtgcccctggacttttctatgagttctttagctaaacgaataaagcagttacatcatgaagcacagcaaagtgaaggggaacagaattacaggaagtttagggcaaagatttgtcctggagaaaatcaagcagccgaagatgaactaagaaaagagataagtaaaacgatgtttgcagaaatggaaatcattggtcagtttaacctgggatttataataaccaaactgaatgaggatatcttcatagtggaccagcatgccacggacgagaagtataacttcgagatgctgcagcagcacaccgtgctccaggggcagaggctcatagcacctcagactctcaacttaactgctgttaatgaagctgttctgatagaaaatctggaaatatttagaaagaatggctttgattttgttatcgatgaaaatgctccagtcactgaaagggctaaactgatttccttgccaactagtaaaaactggaccttcggaccccaggacgtcgatgaactgatcttcatgctgagcgacagccctggggtcatgtgccggccttcccgagtcaagcagatgtttgcctccagagcctgccggaagtcggtgatgattgggactgctcttaacacaagcgagatgaagaaactgatcacccacatgggggagatggaccacccctggaactgtccccatggaaggccaaccatgagacacatcgccaacctgggtgtcatttctcagaactgaccgtagtcactgtatggaataattggttttatcgcagatttttatgttttgaaagacagagtcttcactaaccttttttgttttaaaatgaacctgctacttaaaaaaaatacacatcacacccatttaaaagtgatcttgagaaccttttcaaaccagaaaaaaaaaaaaaaaa

SEQ ID NO: 565 - DNA, 1500 bp, Homo sapiens
gttgctgagagtggtctcaaactcttgggattcaattgatcctcccgcctcagtctcccaaagcgctgagactccaggcgtgaaccaccgcgcccgacctggaaagatacatacatatatatatatatatattttttttttttttttttttttttttgagatagagtttagctcttgttgcccaggctcgagtgcaatggctcgatctcagctcactgcaaactccgcctccagggttcaaacgattctcctgcctcagcctcccgagtagctgggattacaggcgcctcaccacacccggccaatttctgtatttttagtagagacgaggttttaccatgttggccaggctagtctcgaactcctgacctcaggtgatccgcccgcctcggcctcccaaagtgctgggattacaggcgtgagccacggcgcccggcctggataaatcttttaaaacataaaagtctgagtgagtccctggccggccggcacagatgccggggtggggccgtgaaccggttgggacgcgctcgctccggcctggggggacccgggccagcagccggtcgccgcgcgtgcgcactgggcggggggccccgcgctcctacctgcacgtggccagcgcccggcgctgggccgtagctcctgccgtgcacgttggggagccggtacatgcaggtgggaagctccacacggagaggcgcgccgcccccgtgatagggctttacctggtacatcggcatggcagaaccaaagcaaaagggggtagcgcgtgccaaaggccaacgctcagaaaccgtcagaggtcacgacggagaccggccacctcccttctgaccctgctgcgggcgttcgggaaaacgcagtccggtgtgctctgattggcccaggctctttgacgtcacgaagtcgacctttgacagagccaataggcgaaaaggagagacgggaagtatttttgccgccccgcccggaaagggtggagcacaacgtcgaaagcagccaatgggagttcaggaggcggagcgcctgtgggagccctggagggaactttcccagtccccgaggcggatcgggtgttgcatccatggagcgagctgagagctcgaggtgagcggggctcgcagtcttccggtgtcccctctcgcgcgccctctttgagacccacggcattccaacctccctggaaatggggggaacatggccgaggcgcgtggcgaggcagccccctggaggccccggagtggcgacctcagtgttgcagcgatctcgtgccccttgggtgcgccttgaggccgaggcaagctccttcggggtcctgggctgcgggcaaaggattcggccctgtgaggagttgggttcggcctgtcccagacaggccttgcccacatcccatcacagggccgtggacttgaagcgggagcgtgaaatccccatagactgaatgcatttcctttctacctgttctctctccccttttatttttatttttatagtatt

SEQ ID NO: 566 - DNA, 1110 bp, Homo sapiens
gggtggggccgtgaaccggttgggacgcgctcgctccggcctggggggacccgggccagcagccggtcgccgcgcgtgcgcactgggcggggggccccgcgctcctacctgcacgtggccagcgcccggcgctgggccgtagctcctgccgtgcacgttggggagccggtacatgcaggtgggaagctccacacggagaggcgcgccgcccccgtgatagggctttacctggtacatcggcatggcagaaccaaagcaaaagggggtagcgcgtgccaaaggccaacgctcagaaaccgtcagaggtcacgacggagaccggccacctcccttctgaccctgctgcgggcgttcgggaaaacgcagtccggtgtgctctgattggcccaggctctttgacgtcacgaagtcgacctttgacagagccaataggcgaaaaggagagacgggaagtatttttgccgccccgcccggaaagggtggagcacaacgtcgaaagcagccaatgggagttcaggaggcggagcgcctgtgggagccctggagggaactttcccagtccccgaggcggatcgggtgttgcatccatggagcgagctgagagctcgaggtgagcggggctcgcagtcttccggtgtcccctctcgcgcgccctctttgagacccacggcattccaacctccctggaaatggggggaacatggccgaggcgcgtggcgaggcagccccctggaggccccggagtggcgacctcagtgttgcagcgatctcgtgccccttgggtgcgccttgaggccgaggcaagctccttcggggtcctgggctgcgggcaaaggattcggccctgtgaggagttgggttcggcctgtcccagacaggccttgcccacatcccatcacagggccgtggacttgaagcgggagcgtgaaatccccatagactgaatgcatttcctttctacctgttctctctccccttttatttttatttttatagtattttatttttaatttttttttgtagagacggggatttcgctgcgttgcccaggctggtctcgaacgcctgagctcaagcaatccgcccgccttggcccctcaaagtgctgga

SEQ ID NO: 567 - DNA, 1140 bp, Homo sapiens
acaggtgcccaccaccatgcctggctaattttttgtatttttagtaaagacggggtttcaccgtgttggccaggctggtgtcgaactcctgacctcaagttatccacccatctctgcttcccaaagtgctgggattacaggcatgagccaccacagccagccatgctttcacttttcaagaaagaagacaccattgttgccaaagattttggtaatttgagagatacaatgtatgttttctccatgtggatcttagtataattagatagtaaggatctgttgaatttgaagtatctatccagaagtattttgggtacatgtttaaggattgtaaaacagtgtttctatttctggatataataaatgtatttgctaatataataaatgaatagattagacccataaattatttacagtgttgagtcatttcccacagttaaaatcaggatgaaaatatatagctgaatacttgatttgtttcttgtaactgatttctctagtacagaacctgctaaggccatcaaacctattgatcggaagtcagtccatcagatttgctctgggcaggtggtactgagtctaagcactgcggtaaaggagttagtagaaaacagtctggatgctggtgccactaatattggtaagtttgggagagttttaagccacaagaaatgatctgtgaatgttgttgtagttaagaaacatttgttattgaaataagactatcaagtgttgatgtagtaataaattattatttttaagttgaagttagcacctattatgtgcctagtacttagctaggtagtaataataataacagcttttattgtgttcttacggtgtgccaggcaggtgttatgctaagaattgcacagaaatatttaatttgcagaacagctgggcgtggtgtctcacgcctataatcctagccctttgagaggccgaggtgggggaattgcttgaggccaagagttcaagaccaacctggccaacatggtgagaccttgtctctattgaaaaataaagtaggccaggcatagtggctcacgcctgtaatcccagcactttgggaggccaaggcgggtggatacctgaggtcaggagttcgagaccagcctgtccaaagtggtgaaactctgt

SEQ ID NO: 568 - DNA, 1087 bp, Homo sapiens
tttttagtagagacagggtttctccatgttggtcaggctggtctcgaactcctgacctcaggtgatctgctcgctttggcctcccaaagtgctggaattacaggcatgaaccactgcacccggtccccgttctctttattgggtatgttaaaattatttctttcaaaagaaaaggatggtcaaagtgcaacgcggtttacagctaattgatcaccaccagttacagattttttttgttccttctccactccaactgcttcacttcactagcctagggaaaaaaaaagaggaaagaaagaaaaagctaaactatttagtctgggctagtaaatagccagaaaggactttataacaatgaaatatacaaaatgacactagtatgtttaactaaaggtatagttatgactcttaaatttgcatatgttataaataatgtcaatataaaaactgatagcatgggtccgtttttaataaatatgtaaatattttaaactttctagatctaaagcttaaggactatggagtggatcttattgaagtttcagacaatggatgtggggtagaagaagaaaacttcgaaggcttaagtaagttgactttttctaatcctattataaaataattgggtcacatgtctcagaattttgagtaacactgtcttgggaaatgcaaaaacagttttttaaagccagttactagatatcatgtatattttgttgttatagcacttgagatatcttagtccttactttacactctctttcagctctgaaacatcacacatctaagattcaagagtttgccgacctaactcaggttgaaacttttggctttcggggggaagctctgagctcactttgtgcactgaggtgatacaatatttttatccactcacttgaccccttagagaaacctctctgaaaattaattggaatcattattattttcagttttctatctcaacatctcaacttctagcttctgaattctgttttgtctcgctgccaatctaagtcatagtacttctgaaatgtgagcaataaatgaatgaaatgaagcaaatagtattgttaaaaagatggttacc

SEQ ID NO: 569 - DNA, 1103 bp, Homo sapiens
ctagcctagggaaaaaaaaagaggaaagaaagaaaaagctaaactatttagtctgggctagtaaatagccagaaaggactttataacaatgaaatatacaaaatgacactagtatgtttaactaaaggtatagttatgactcttaaatttgcatatgttataaataatgtcaatataaaaactgatagcatgggtccgtttttaataaatatgtaaatattttaaactttctagatctaaagcttaaggactatggagtggatcttattgaagtttcagacaatggatgtggggtagaagaagaaaacttcgaaggcttaagtaagttgactttttctaatcctattataaaataattgggtcacatgtctcagaattttgagtaacactgtcttgggaaatgcaaaaacagttttttaaagccagttactagatatcatgtatattttgttgttatagcacttgagatatcttagtccttactttacactctctttcagctctgaaacatcacacatctaagattcaagagtttgccgacctaactcaggttgaaacttttggctttcggggggaagctctgagctcactttgtgcactgaggtgatacaatatttttatccactcacttgaccccttagagaaacctctctgaaaattaattggaatcattattattttcagttttctatctcaacatctcaacttctagcttctgaattctgttttgtctcgctgccaatctaagtcatagtacttctgaaatgtgagcaataaatgaatgaaatgaagcaaatagtattgttaaaaagatggttacccttattaaaacagtaattctcaattttaacctaacatgtagataataaatgatagttaccattggttttcattatcaatttttagggaaacatttcaccaaagcactatttaattatagcacagatatgaaatttttataaataattatatatatatatatatatctttttttttttttagacagagtctctctttgtcacccaggctggagtgcagtggcacagtctcggctcactgcaatctctgccttccaggttcaagtgattctcgtgcctgagcct

SEQ ID NO: 570 - DNA, 1184 bp, Homo sapiens
tttttagtagagatgggatttcaccatgttgcctaggctggtctcaaactcctggcctcaagtgatctgcctgccttggcctcccaaagtgctgggataacaggcatgagccaccacgctctgccctacatatacattttaattataatatttgttagattctttaaaaaaaatttgttcgaagagtaataacaaaacaaatctgtgtttgtgaataaataaatcttaagatcatttatggttttgcagttcaacctgaaaaacgaaatcaaagcttttatcaaagcaaagcatgtttagtgctctctgtctcactgtcttttagatgccaaaccttagattttatgatgactcctcaaccatttagatcttgattatctcagagggatcgtcagctttttaagaaaattttgagagaaaagcaagtgaagaaaagagtagtcagtgcccaacatcatgggtctctcactgaacacaccatgcctggtattctctcacagcgatgtcaccatttctacctgccacgcatcggcgaaggttggaactcgactgatgtttgatcacaatgggaaaattatccagaaaaccccctacccccgccccagagggaccacagtcagcgtgcagcagttattttccacactacctgtgcgccataaggaatttcaaaggaatattaagaaggtacagtaaattaatcctggttttcaagagtattggttaatgcacatgagcaaaagatttactaaagatgtttattcttcagttgattctcttcccataaattattgagaaatgctttatttgcatttctcattaaagatttaacattaaagacttaactttaggatgatttacttttttcttttcatcacatagtgtttattaggactgggcaacacagtgagaccctgtctctatgaaaaattttaaaaaaaaatttactgggcatggtgacatgtacctgtagttccagctacttgggaggctgaagtgggaggatcacttgagcccaggaacttgaggctgcagtgagctatgattgcgccactgcacttaagactgggagacagaataagatcctgtctggaaaaatatatatacatatatatatattttttattttttatttttatctttttttgagatggagtttctctttggcgccctggctggagtgcggt

SEQ ID NO: 571 - DNA, 1168 bp, Homo sapiens
caccgaggctggagtgcagtggtgcaatcatggctcactgcagccttgaactcctaggctcaagcgatcctcccacctcagcctcctcagtagctgtgactacaggcacatgccatgacgcccggctaattttttttttaaattttttgtagagacagggtcttgctgtgttgcccaggctggtcttgaactcctggtctcaagtgatcctcctgccctcagcctcctgagtagctgggattacaggctgtactttttagttgttttaccaggatgcatggcacattgggaagtgagaggactgtgaccaggagccaaaagctctgcgttcctttctgtagaatataggaagacacctctttacagatcattctgtcaacagtgcttcccttgatttgtgcgatgatgtgagaaccttgcgttggatgttgtaacttgagctgtgtaattcctataatattaaagtaatgtagaatattgtgtttgtgttttttaaacaggagtatgccaaaatggtccaggtcttacatgcatactgtatcatttcagcaggcatccgtgtaagttgcaccaatcagcttggacaaggaaaacgacagcctgtggtatgcacaggtggaagccccagcataaaggaaaatatcggctctgtgtttgggcagaagcaggtagtgatggccggttacttcaacgcctcttattgctctagtgattatagcgggtttccattgtcccttccagtagaatggagaataaaatcttagaattgattttttttttttttttgagagggagtctcgcactgctgcccaggctggagtgcagtggtgttgtcttggctcactgcaacctccgcctcccagattcaagcaattctcctgcctcagcctcccgagtagtgggattacaagcatgctccactacgccaggctaattttttgtatctttagtagagacggggtttcaccgtgttggccaggctggtctcgaattcctgacctcgtgatccaccagcctcggcctcccaaagtgctgggattacaggtgtgagccaccaagcccggccggttttttttttttttgagctggagtcttgctctgttgcccaggttggagtgcagtggcgccatcttggctcactgcaacctctgcctcccgcgttgaagca

SEQ ID NO: 572 - DNA, 1098 bp, Homo sapiens
tttcatctttcttatatcataaaatcaaaattgttgttcccacggctcacacatgtaatcccagcactctgggagaggaaactgttgggattatgtgtttgaaccacccggccaacaattttgaggtgggagaatcgcttgagcccaggaatttaagaccagcttggataacacggcaagatcccatctctacaaaaaaattaaaaaattagccaggtgtggtggtgtgcacctgtagtcccagctactcactcgacaggctgacgcaggaggattgcttgaacccacgagtttgacattgcagtgaggtatgattgagccattgtactccagcctgggcaatagagggagaccctgtctcaaaaaacaaaacaaaacaaaagattcttttaattttttttgcgcttgtaatgtcaatagcttgactaagaaagaaaacagattaagtccactctgtctttattaggaagtaactgtgaatttttttttttttttttcagttgcaaagcctcattccttttgttcagctgccccctagtgactccgtgtgtgaagagtacggtttgagctgttccgatgctctgcataatcttttttagtaagtagattgctggcaagagaactacaattgaacattttatcctgagagctttttttttaaagatagtgattctaaggctaatagtttcgtgtctttttttttttttcttgagacggagtcttgctttgttgcccaggctggagtgcaatggtgctatcttggctcactgcaacctctacctcctgagttcaagcaattctcctgcctcagcctcctgagtagctgggattacaggcacgtgccaccacacccggctaattttgtatttttagtagagacggggtttcaccatgttggccaggctggtctcgaactcctgacctcagatgatccgcccaccttggtgtcccaaagtgctgggattacaggcatgagccaccacgcctggctagggataatagttttttatgtcctttataaaactgtgagcaatgctgtggctaagaaagatgatttatacaaaggagtcagttgcttaattcaaaccatgttttgag

SEQ ID NO: 573 - DNA, 1100 bp, Homo sapiens
tggaaatgccggtatccctggggtgggtctcatgtgaagcaagcgctttaccaagacatgagatataagcgtcctacccgggaggttttgaaaggggagggaatgtgggcaaaattctgagcacaagtggttagacttcattgacaaaccaggggtggcagcacggaggttctgagaatgcatttgaagcgagacccacttacagaggctgaggatttatcaggaagggtaaggagagctgcaacacatcagttttggacgcactgcatcacctgtggtgcattggttgactgtaggagctttagaatattccagaaggtttggttctttgatgactcatcaagatttggagcacagatacccgtgaactgcaatagtgatccttatcagcatgtcacctggtgttttgttttcatttcactttaagaatgtgccatgtgatcgtatttctaatccctttcactctggaatcctgcccttaccatattaatgttgaatagcatctcaggtttcatttcacaatgcacgcatggagttggaaggagttcaacagacagacagtttttctttatcaaccggcggccttgtgacccagcaaaggtatttaaaatttttttgtgttagtttgttctttatgcctttgacttttaattgataacttttttctgataataggcagtttacgtggagctcgggactttgagaaacatggctttaacattatcttattttgtgcatttacagaagtctaccgcagatggcccccagcttcagatgtttcaactgaagacttttctgtccgggcgcagtggctcatgcctgtaatcccagcactttgggaggccgaggcgggtggattgcctgaggccaggagttcgagaccagcctggccaacatgacaaaaccccgtctctactaaaatacaaaaaataaccaggcatggtgttccacgcctgtaatcccagctacatgggaggctgaggcaggaggatcacttgaacctgggagatggagcttgcagtaagccgagattatgccactgcactccagcctgggtgacagagcgagactgtgtttcaaaaaaatatatatatattttt

SEQ ID NO: 574 - DNA, 1085 bp, Homo sapiens
aactgaggtcaggagttcgagaccagcctggccaacatggtgaaaccccatctctactaaaaacacaaaaattatctggtcatggtggcgtgtgcctgtaatcccagctactctggaggctgagtcaggataatcacttgagccccggaggcagaggttgcagtgagccaagatcgtgccattacactccagtctgggtaacaagagcgagactccgttgaaaaaaaaaaagaaaaaaaaatcctgcctgtaatccaagttacatgtcaggctgacacaggaggatcacttgagcctgggaggttgaggctgcagtgagccatgattgctccactgcactccaggctgtgacaaggcgagaccttgactcaaaaaaaaaaaaaacaaaaaagtatccccttctaagaacatgctggttggttagaatagaatgttgttagaatgcggggggctgggaacatttgtcatttattcttttctactccttgtattttgtgcaggtctgcagactcgtgaatgaggtctaccacatgtataatcgacaccagtatccatttgttgttcttaacatttctgttgattcaggtaagttccattggcatttcagtacaactagtgactaatgcctcaaagaataaaatgaaattctacagctctgctatgactggaatgagataacaatttatggtcatgtaagttttttgtttttgtttttttttgagacggggtcttgctctgtcacccaggctggagtgtggtggcgtgatctcggctcactgcaacctctgcctcccgggttcaagcgattctcctgactcagcctcccaagtagctgggactacaggtgcgtgccaccacacctggctaattttttgtatttttagtagagacagggtttcaccgtgttagccaggatggtctcgatctcctgacctcgtgatctgcccgtcttggcctcccaaagtgctgggattacaggcatgagccaccgtgcctggccctataattttttttttttttaaacagagttcccgctttctacttgagactatgttaattatattgttaggaaaatgtaatttttt

SEQ ID NO: 575 - DNA, 1156 bp, Homo sapiens
aattgtcttttgctcatttatttgaaaaagctgatttcataacttatgaatcttaacctggacactgtaatgtttttaatagcacttgtgataaatacaagtgaatgaaataatagatggggaaatttctattgttaaaagtgaatttggctgggcgcggtggctcacgcctgtaatcccagaactttgggaggccaaggcgggtggatcacttgaggttgtgagttcgagaccagcctggccaacacggtgaaaccccatctctactaaaaatacaaaaattagccagtgtggtggcacttgcctgtaatcctagctacttcggaggctgaggcagggagaatcacttgaacccaggaggcggaggttgcagtgagctgagatcgcgccactgcactccagcctaggcgacagagtgagacgctgtctgaaaataataattaataaataaaataaaagtgaatttaaacataataaatatgttttcttttttgccttagaatgcgttgatatcaatgttactccagataaaaggcaaattttgctacaagaggaaaagcttttgttggcagttttaaagacctctttgataggaatgtttgatagtgatgtcaacaagctaaatgtcagtcagcagccactgctggatgttgaaggtaagaaaaatacagtgtacaaacagcttctaaagcttttagctaatgtgtttccttattttttccaagtaaacttttttttgacatgaaaacaaagtctcttatattattttatcatttttaattcttttttgagacagggacttgctctgtcacccaggctggactgcagtggtgccattgtagctcactgcagcatcacactcctgggctcaggccatcttcctgcctcagcctcccaagtagctgcctccaagtacctctagttttttgtaaactgtaaacggatgaagtcatataagatatatgattagaagaagtctgcagtgactgcatttttaactcccttgtcatgtctgtttttttgagatggagtttcgctcttgtcacccaggctggagtgcaatgatgcgatctcagctcactgcaaccttgaagcctcccacgttcaagagattctcctgcctcagcctcctgagtagctgggattacaggcgccc

SEQ ID NO: 576 - DNA, 1862 bp, Homo sapiens
accattctggtgagtatatggccatattgcattgtgttgtggttttttttttttttttttttttttttgagacagagtgttgctctgtcacccaggctggagagcagtggtggcatcttggctcactgcaacctctgcctcccgggctaaagggattctcgtgcctcagcctcccaagtagctgggatgacagatatgccaccacacccggctaatttttgtatttttagtagaaacagggttttaccatgttgtccagaccagtcctgaactcctagcctcatgtgatccccctgccttggcctcctaaagtgctgggataacaggcgtaagccaccacacctggcccatattatagttttattttgaacattgaactgtgttcatctgtgtaattagcatgtggatctcctcttttgtgaagtatctgttcacataagcacgtcctctcaccatttcaggatagtccctgaccctcttctccgtccacgtttgcttaggtaacttaataaaaatgcatgcagcggatttggaaaagcccatggtagaaaagcaggatcaatccccttcattaaggactggagaagaaaaaaaagacgtgtccatttccagactgcgagaggccttttctcttcgtcacacaacagagaacaagcctcacagcccaaagactccagaaccaagaaggagccctctaggacagaaaaggggtatgctgtcttctagcacttcaggtgccatctctgacaaaggcgtcctgagacctcagaaagaggcagtgagttccagtcacggacccagtgaccctacggacagagcggaggtggagaaggactcggggcacggcagcacttccgtggattctgaggggttcagcatcccagacacgggcagtcactgcagcagcgagtatgcggccagctccccaggggacaggggctcgcaggaacatgtggactctcaggagaaagcgcctaaaactgacgactctttttcagatgtggactgccattcaaaccaggaagataccggatgtaaatttcgagttttgcctcagccaactaatctcgcaaccccaaacacaaagcgttttaaaaaagaagaaattctttccagttctgacatttgtcaaaagttagtaaatactcaggacatgtcagcctctcaggttgatgtagctgtgaaaattaataagaaagttgtgcccctggacttttctatgagttctttagctaaacgaataaagcagttacatcatgaagcacagcaaagtgaaggggaacagaattacaggaagtttagggcaaagatttgtcctggagaaaatcaagcagccgaagatgaactaagaaaagagataaggtaaagttttaattttttactttttctctttttatctaaaatttttatttttattttttatttttttgagacagagtcttgctctgttgcgcaggctggaatgcagtggcatgatcttggctcactgcagcctccacctcccgggttcaagcgtttctcctgcctcagcctcctgagtagctgggattacaggtgcacgccaccatgcctggctaatttttatatttttggtggaaacagggtttcaccatgttggctgggctggtctcgaactcctgacttcaggtgatccagccaccttggcctcccaaagtgctgggattacaggtgtgagccaccacacccggccaggtaaagttttttcttaagagtattttgaggctaggtgtggtggctcacacctgtaatcccagtactttgggaggccaagccaaggagggaggatcacttgagcccaggagttcaagaccagcctggacaacatagggagacctcgtctc

SEQ ID NO: 577 - DNA, 1168 bp, Homo sapiens
tcgttaatagtagcaactgatgtcttctccggagagttggatgaatgaataattaatgttatctttagaaagtgggatggttaagccgaacgcagtggctcacgcctgtaatcccagcactttgggaggccaaggcgggcagatcatgaggtcaggagttcgagaccagcctgaccaacatggtggaactctgtctctactaaaaatacaaaaattagctgggcatggtggcgcacctgtaatcccagctactcaggaggctgaggcagaagaatcactcgaacccgggaggtggaggttgcagtgagccaagattgtgccattgcactgtagcctgggtgacagaacgagactctgtttcaaaaaaaaagaaagcgggatggctagggactttattttgtttttgtattgtttgactttttttttattacagtgttctataacataatcagaaaaataatcttgtaaaatgtctgataattaacattttctacctgcagtaaaacgatgtttgcagaaatggaaatcattggtcagtttaacctgggatttataataaccaaactgaatgaggatatcttcatagtggaccagcatgccacggacgagaagtataacttcgagatgctgcagcagcacaccgtgctccaggggcagaggctcatagcgtgagtgtgtttagtgttcattcccagactccccctcaaattgaagatctaatagaggccaaggcaggaggatcacaagaggccaggagtttgagaccagcccggacaacacagcaagaccttgtatctactttaaaaaagaagagatctaggaaggaggggtgtaaaaaataaaaaatatctagttggccaggcgcggtgcctcacacctgtaatcccagcactttgggaggccgaggcaggcagatcacctgaggtcaggagttggagaccagcctggccaacgtggtgaaaccccgcctctactaaaaatacaaaaaggccaggcacggtggctcacgcctataatcccggcactttgggaggccgaggtgggcagatcacttcaggtcgggagttcgagaccagcctgaccaacatggtgagacctgtctctactaaaaatacaaaattagccaggcgtggtggcgggcgcctgtagtcccagctacttgggaggc

SEQ ID NO: 578 - DNA, 1101 bp, Homo sapiens
agagtcttgttgtgtcgcccaggctggagtacagtggcgtgatcttggctctcactacaacctctgcctccctcctgggttcaaacgaatctcatgcctaagcctcccaagtagctgggactacaggcgtgcgccaccatgcctggcctaatttttatatttttagtagagagagtgtttcgctgtgttgaccaggccggtctcaaactcctggcctcaagagatctgcctgcctcgggctcctaaagtgctgagattacaggcgtgagccaccgcacctggcctgtagctactttaacttctaaaaagaactttaagaaagagaaaattaaaaggaacttctcaggaagttttgtgacacttagctgagtagtgttgttatttgtgttgttattttgacatgaattcaaaatacagtattgttgttttcatttcatttctgctgtaaagctaaatgtttgacttcaggatatggtttgaatcatttttgtgtttttcagacctcagactctcaacttaactgctgttaatgaagctgttctgatagaaaatctggaaatatttagaaagaatggctttgattttgttatcgatgaaaatggtaagttattaattagaactatagcggctgggtgtggtggctcacgtctgtaatcccagcactctgggaggccaaggcgggcagatcgcctgaggtcaggagtttgagaccagcctggctaacatggtgaaaccccatctctactgaaaatacaaaaagtagccgggcgtggtggcgggtgcctgtaatcccagctactcaggaggctgaggtgggagaatcgcttgaacccgggaggtggaggttgcagtgagccgagatcacgtcactgcactccagcctgggcaacaagagtgaaactctgtctcaaaaaaaaaaaaaaatcagaactatagattcttgtctttttagagctgggaataatctttcaggtcatatagaccagttttttttaattttataaaagattaaaaagttcctccaaaaagcattttgtgagtttcctctctttcaggtgttcactttttttttttctgagatggagtcttgctctgtcgccc

SEQ ID NO: 579 - DNA, 1170 bp, Homo sapiens
cttgtctttttagagctgggaataatctttcaggtcatatagaccagttttttttaattttataaaagattaaaaagttcctccaaaaagcattttgtgagtttcctctctttcaggtgttcactttttttttttctgagatggagtcttgctctgtcgcccaggctggagcgcagtggtgccgatctcggctcactgcaagctccgcctcccaggttcacaccattctcctgcctcagcctcccgagtagctgggactacaggtgcctgccaccacacccagctaattttttctattttttagtagagacggggtttcaccatgttagccaggatggtctgtatctcctgacctcatgatccgctggcctcagcctcccaaagtgcagggattacaggcgtgagccaccacgcccggcctcagatgttcatcctaagtagctttcaagtgaaacgtgtttgtcaagtcatggatttttctcaaaattgtattcttttagctccagtcactgaaagggctaaactgatttccttgccaactagtaaaaactggaccttcggaccccaggacgtcgatgaactgatcttcatgctgagcgacagccctggggtcatgtgccggccttcccgagtcaagcagatgtttgcctccagagcctgccggaagtcggtaagtaaagaaagcctggctgtcagctcagctgctcaagcttgcagtcgaggaaggtctcagcccagctcctgatttggtcaaggttgtaaacgcctttgtgattgccaggggtcattttacacagagagctacgtgcagcgtcgtagctgagcatctgtgtcgtctgcgttctctgtgaccttgaactcataattattgctcttttgttacctctgttaagcagtattcttggccgggcatggtggctcaagcctctaatcccagcactttgggaagctgaggcgggcggatcacgagttcaggagatcgagaccatcctggctaacatggtgaaagcccgtctctactaaaaatacaaaaaaattagccgggcgtggtgtcgggcgcctatagtcccagctactcgggaggctgaggcaggagaatggcgtgaacccagaaggcggaacttgcagtgagccaagttcataccactgcactccaacctgggcgacaga

SEQ ID NO: 580 - DNA, 1304 bp, Homo sapiens
aggaagggaggcattcgtgcttggaggtgggggtgcaggcacagcccagcgagggccaagtcaggggacagacgggggcttttattcaggtgagggggagagctgtgaagtggaatgaataacctgacagccctttaaaagtaatcactggctgctgagtggagagcggctcggaggggtcgcagtggggcagggaggcctgctgggaggctgctgcacctgccagggtgagagggcagggtggctgctgagacaggtgtggtcggcgtctggagtggaggcggtgccaccttgaaggagccacaaggagcctgatttcacagaagggtggagggctgagatctagaacctaggcttctctgggggaaggtttttcagggaaggtagtttttgagctgtaatcttgtccagccttattttagagaagaatgcttctgaagagctgccattctgacgtcaaaaaactactaaaacgttgaaccattgtgtctcacactcaggtgatgattgggactgctcttaacacaagcgagatgaagaaactgatcacccacatgggggagatggaccacccctggaactgtccccatggaaggccaaccatgagacacatcgccaacctgggtgtcatttctcagaactgaccgtagtcactgtatggaataattggttttatcgcagatttttatgttttgaaagacagagtcttcactaaccttttttgttttaaaatgaacctgctacttaaaaaaaatacacatcacacccatttaaaagtgatcttgagaaccttttcaaaccagatggagcattgcttgcaaattttttttctctatgtttgcatgcgctcgtgtgtgtgtgtccaggcaagaacacattttataaaaataagaacacttgggctgggcatggtggctcatgcctgtgatcgcagcactttgggaggccgaggccggcggatcacctgagatcagaagttcgagaccagcctgaccaacatggagaaaccctgcctctactaaaaatacaaaattagccaggtgtgctggcgcatgcctgtaatccccgctacccaggaggctgaggcaggagaatcgcttgaacccgggagacggaggttgcagtgaaccgagattgcgccactgcgctccagcctgggtgagatagaacaagactgtgtctcaaaaaacaaaacaaaacaaaacaaaaaaaaaaaaaccaaaccactttggaagttactcaggcctctgctctggctggacatagtttagtctataactttcaacccttaatgataattaaat

SEQ ID NO: 581 - DNA, 1500 bp, Homo sapiens
aaggagcctgatttcacagaagggtggagggctgagatctagaacctaggcttctctgggggaaggtttttcagggaaggtagtttttgagctgtaatcttgtccagccttattttagagaagaatgcttctgaagagctgccattctgacgtcaaaaaactactaaaacgttgaaccattgtgtctcacactcaggtgatgattgggactgctcttaacacaagcgagatgaagaaactgatcacccacatgggggagatggaccacccctggaactgtccccatggaaggccaaccatgagacacatcgccaacctgggtgtcatttctcagaactgaccgtagtcactgtatggaataattggttttatcgcagatttttatgttttgaaagacagagtcttcactaaccttttttgttttaaaatgaacctgctacttaaaaaaaatacacatcacacccatttaaaagtgatcttgagaaccttttcaaaccagatggagcattgcttgcaaattttttttctctatgtttgcatgcgctcgtgtgtgtgtgtccaggcaagaacacattttataaaaataagaacacttgggctgggcatggtggctcatgcctgtgatcgcagcactttgggaggccgaggccggcggatcacctgagatcagaagttcgagaccagcctgaccaacatggagaaaccctgcctctactaaaaatacaaaattagccaggtgtgctggcgcatgcctgtaatccccgctacccaggaggctgaggcaggagaatcgcttgaacccgggagacggaggttgcagtgaaccgagattgcgccactgcgctccagcctgggtgagatagaacaagactgtgtctcaaaaaacaaaacaaaacaaaacaaaaaaaaaaaaaccaaaccactttggaagttactcaggcctctgctctggctggacatagtttagtctataactttcaacccttaatgataattaaattcatctttgtttaatttcataaatttaaaagtagggtccttttcagttagtgattctcagccctgattcacattaaatttttaaacacgggggattctctgcccggctggaagaaaatgactggatgggacaggggtcactatttgaaacattcctctgtgcggccaaggtcgcaaaatgctgtcctcgcaggggaacaaaaagagtttgatttcccataatttgatgctgtgatttggtttcctcaggatgtgaactgtagaacattccagttactggccttgaatggttctgggaatataagaatccctgtctgtcttttcaaatagttttcatggaaccttgtcctgtttgaacttggctgaaaatggaagtaaagatgccctcttgggggcccagagatgacagatgtggctccccctgctgcccccaccccttctccagactgtgggcggctccccttcctgctttagaatccctcagatggaggaggcagtaca

SEQ ID NO: 582 - DNA, 8065 bp, Homo sapiens
acccaggagggctgtgctgatagcacgttcctcgagtttactttgctttccttgagtttattgtaaaggggtaaagttttcggatccgtcacgtgaccctgacaggtcctgcctatggcgcggcagaccacccacgccgagggccatggaactgcttaatagaaacaggcttgtaattgtgagtccgcgctgcactccgccgaaagcctccggcggcccagcgcgccggggtttttacactttccgttccttttgtaaagacggaggaggaggagaagaagaagaagaaaacggaggagaagaaaaagacgacaggggagacaaagagacccgcagcgacaaggcaagggggagacgagggaagactgggagaagacggaggagcggaggacgaggaaaggggggccagggaaaaaaaaggaattgatgtgaaatccaagcccagcgtccgcgccatcggcacccgcgctccgagcaggggttgacggccggctatggggaaggctactggccggaaagcgccgctgtggctgagagcgaagtttcagagactcttatttaaactgggttgttacattcaaaaaaactgcggcaagttcttggttgtgggcctcctcatatttggggccttcgcggtgggattaaaagcagcgaacctcgagaccaacgtggaggagctgtgggtggaagttggaggacgagtaagtcgtgaattaaattatactcgccagaagattggagaagaggctatgtttaatcctcaactcatgatacagacccctaaagaagaaggtgctaatgtcctgaccacagaagcgctcctacaacacctggactcggcactccaggccagccgtgtccatgtatacatgtacaacaggcagtggaaattggaacatttgtgttacaaatcaggagagcttatcacagaaacaggttacatggatcagataatagaatatctttacccttgtttgattattacacctttggactgcttctgggaaggggcgaaattacagtctgggacagcatacctcctaggtaaacctcctttgcggtggacaaacttcgaccctttggaattcctggaagagttaaagaaaataaactatcaagtggacagctgggaggaaatgctgaataaggctgaggttggtcatggttacatggaccgcccctgcctcaatccggccgatccagactgccccgccacagcccccaacaaaaattcaaccaaacctcttgatatggcccttgttttgaatggtggatgtcatggcttatccagaaagtatatgcactggcaggaggagttgattgtgggtggcacagtcaagaacagcactggaaaactcgtcagcgcccatgccctgcagaccatgttccagttaatgactcccaagcaaatgtacgagcacttcaaggggtacgagtatgtctcacacatcaactggaacgaggacaaagcggcagccatcctggaggcctggcagaggacatatgtggaggtggttcatcagagtgtcgcacagaactccactcaaaaggtgctttccttcaccaccacgaccctggacgacatcctgaaatccttctctgacgtcagtgtcatccgcgtggccagcggctacttactcatgctcgcctatgcctgtctaaccatgctgcgctgggactgctccaagtcccagggtgccgtggggctggctggcgtcctgctggttgcactgtcagtggctgcaggactgggcctgtgctcattgatcggaatttcctttaacgctgcaacaactcaggttttgccatttctcgctcttggtgttggtgtggatgatgtttttcttctggcccacgccttcagtgaaacaggacagaataaaagaatcccttttgaggacaggaccggggagtgcctgaagcgcacaggagccagcgtggccctcacgtccatcagcaatgtcacagccttcttcatggccgcgttaatcccaattcccgctctgcgggcgttctccctccaggcagcggtagtagtggtgttcaattttgccatggttctgctcatttttcctgcaattctcagcatggatttatatcgacgcgaggacaggagactggatattttctgctgttttacaagcccctgcgtcagcagagtgattcaggttgaacctcaggcctacaccgacacacacgacaatacccgctacagccccccacctccctacagcagccacagctttgcccatgaaacgcagattaccatgcagtccactgtccagctccgcacggagtacgacccccacacgcacgtgtactacaccaccgctgagccgcgctccgagatctctgtgcagcccgtcaccgtgacacaggacaccctcagctgccagagcccagagagcaccagctccacaagggacctgctctcccagttctccgactccagcctccactgcctcgagcccccctgtacgaagtggacactctcatcttttgctgagaagcactatgctcctttcctcttgaaaccaaaagccaaggtagtggtgatcttcctttttctgggcttgctgggggtcagcctttatggcaccacccgagtgagagacgggctggaccttacggacattgtacctcgggaaaccagagaatatgactttattgctgcacaattcaaatacttttctttctacaacatgtatatagtcacccagaaagcagactacccgaatatccagcacttactttacgacctacacaggagtttcagtaacgtgaagtatgtcatgttggaagaaaacaaacagcttcccaaaatgtggctgcactacttcagagactggcttcagggacttcaggatgcatttgacagtgactgggaaaccgggaaaatcatgccaaacaattacaagaatggatcagacgatggagtccttgcctacaaactcctggtgcaaaccggcagccgcgataagcccatcgacatcagccagttgactaaacagcgtctggtggatgcagatggcatcattaatcccagcgctttctacatctacctgacggcttgggtcagcaacgaccccgtcgcgtatgctgcctcccaggccaacatccggccacaccgaccagaatgggtccacgacaaagccgactacatgcctgaaacaaggctgagaatcccggcagcagagcccatcgagtatgcccagttccctttctacctcaacggcttgcgggacacctcagactttgtggaggcaattgaaaaagtaaggaccatctgcagcaactatacgagcctggggctgtccagttaccccaacggctaccccttcctcttctgggagcagtacatcggcctccgccactggctgctgctgttcatcagcgtggtgttggcctgcacattcctcgtgtgcgctgtcttccttctgaacccctggacggccgggatcattgtgatggtcctggcgctgatgacggtcgagctgttcggcatgatgggcctcatcggaatcaagctcagtgccgtgcccgtggtcatcctgatcgcttctgttggcataggagtggagttcaccgttcacgttgctttggcctttctgacggccatcggcgacaagaaccgcagggctgtgcttgccctggagcacatgtttgcacccgtcctggatggcgccgtgtccactctgctgggagtgctgatgctggcgggatctgagttcgacttcattgtcaggtatttctttgctgtgctggcgatcctcaccatcctcggcgttctcaatgggctggttttgcttcccgtgcttttgtctttctttggaccatatcctgaggtgtctccagccaacggcttgaaccgcctgcccacaccctcccctgagccaccccccagcgtggtccgcttcgccatgccgcccggccacacgcacagcgggtctgattcctccgactcggagtatagttcccagacgacagtgtcaggcctcagcgaggagcttcggcactacgaggcccagcagggcgcgggaggccctgcccaccaagtgatcgtggaagccacagaaaaccccgtcttcgcccactccactgtggtccatcccgaatccaggcatcacccaccctcgaacccgagacagcagccccacctggactcagggtccctgcctcccggacggcaaggccagcagccccgcagggacccccccagagaaggcttgtggccacccccctacagaccgcgcagagacgcttttgaaatttctactgaagggcattctggccctagcaatagggcccgctggggccctcgcggggcccgttctcacaaccctcggaacccagcgtccactgccatgggcagctccgtgcccggctactgccagcccatcaccactgtgacggcttctgcctccgtgactgtcgccgtgcacccgccgcctgtccctgggcctgggcggaacccccgagggggactctgcccaggctaccctgagactgaccacggcctgtttgaggacccccacgtgcctttccacgtccggtgtgagaggagggattcgaaggtggaagtcattgagctgcaggacgtggaatgcgaggagaggccccggggaagcagctccaactgagggtgattaaaatctgaagcaaagaggccaaagattggaaaccccccacccccacctctttccagaactgcttgaagagaactggttggagttatggaaaagatgccctgtgccaggacagcagttcattgttactgtaaccgattgtattattttgttaaatatttctataaatatttaagagatgtacacatgtgtaatataggaaggaaggatgtaaagtggtatgatctggggcttctccactcctgccccagagtgtggaggccacagtggggcctctccgtatttgtgcattgggctccgtgccacaaccaagcttcattagtcttaaatttcagcatatgttgctgctgcttaaatattgtataatttacttgtataattctatgcaaatattgcttatgtaataggattattttgtaaaggtttctgtttaaaatattttaaatttgcatatcacaaccctgtggtagtatgaaatgttactgttaactttcaaacacgctatgcgtgataatttttttgtttaatgagcagatatgaagaaagcacgttaatcctggtggcttctctaggtgtcgttgtgtgcggtcctcttgtttggctgtgcgtgtgaacacgtgtgtgagttcaccatgtactgtactgtgattttttttttgtcttgttttgtttctctacactgtctgtaacctgtagtaggctctgacctagtcaggctggaagcgtcaggatatcttttcttcgtgctggtgagggctggccctaaacatccacctaatcctttcaaatcagcccggcaaaagctagactctcctcgtgtctacggcatctcttatgatcattggctgccatccaggaccccaatttgtgcttcagggggataatctccttctctcggatcattgtgatggatgctggaacctcagggtatggagctcacatcagttcatcatggtgggtgttagagaattcggtgacatgcctagtgctgagccttggctgggccatgagagtctgtatactctaaaaagcatgcagcatggtgcccctcttctgaccaacacacacacgacccctcccccaacacccccaaattcaagagtggatgtggccctgtcacaggtagaaaaacctatttagttaattctttcttggcccacagtctcccagaaatgatgttttgagtccctatagtttaaactccctctcttaaatggagcagctggttgaggctttctagatctgtttgcatcttctttaaaactaagtggtgagcatgcattgtggtgtagaggcaggcattatgtaggataagagctccggggggattcttcatgcaccagtgtttagggtacgtgcttcctaagtaaatccaaacattgtctccatcctccccgtcattagtgctctttcaatgtgatgtgggaaagcaggaggatggacacaccccactgaaagatgtaggcaggggcaggtctctcaaccaggcatatttttaaaagttgcttctgtactggttctcttcttttgctctgaggtgtgggctccctcatctcgtaaccagagaccagcacatgtcagggaagcacccagtgtcggctccccatccaaatccacaccagcaccttgttacagacaagaagtcagaggaaagggcggggtccctgcagggctgaagcctaagctactgtgaggcgctcacgagtggcagctcctgttactcccttttaaattacctgggaaatcttaacagaaaggtaatgggcccccagaaatacccacagcatagtgacctcagaccctgatactcaccacaaaacttttaagatgctgattgggagccgcttgtggctgctgggtgtgtgtgtgtgtgtgtgcgtgcgtgcgtgtgtgtgtgtctctgctggggaccctggccacccccctgctgctgtcttggtgcctgtcacccacatggtctgccatcctaacacccagctctgctcagaaaacgtcctgcgtggaggagggatgatgcagaattctgaagtcgacttccctctggctcctggcgtgccctcgctcccttcctgagcccagctcgtgttgcgccggaggctgcgcggcccctgatttctgcatggtgtagaactttctccaatagtcacattggcaaagggagaactggggtgggcggggggtggggctggcagggaattagaatttctctctctcttttaatagttttattttgtctgtcctgtttgttcatttggatgttttaatttttaaaaaaaaaaaaactttgctgatatttataattttgtatcataagaatgttttcctctacagtatttgtcatgccagtttataacaaaaaaaaatgcagggattttatttctattggaaacattacagctatgttttacttttggacagaatttttatttgtatagagtgcttactaatgttaaatagttcagagtatataacatttacattaaggactcatggtaggttttagggtaaggagtttaaaggaaataaatattcaaactgggtctcattgccaattttggtggaaatgagtttgtgtcatttcaattacaaagataaaagtatgccatataatttatttatatgaagatttatttttgtagtgtacatagtagtcatcaagtcttttgacagaagtatatttttaaagaatttatatgtgatgaatccataatgtctggaactttgctgagacatgagtgggcacagttttcattgtaaattacagcaaggaaagaaaatgtttaacagtgttaagagagtcagagcagagtggatattcatgcgattatgaagtgtttattagttaccattggcgacctagcatgcttctcatttcaaaccttggaaggtgaaaatgtacaaactctctaaataattaatgttcaaacactgatagaaattctaacatgaataaaaaataatataacttgttggttatatctttgtttgtagaatgctttttttctttaaaatacttgggagagacagttagtgttggagccatcagaaactgttgtttcatcttgctgaccttgtgacactcttcttttttgctctatctgatggagagagttttaggttttcctcctttttgttttgtataaatagtgggtataagcatagctctgttacatggatgtattacaaagtgggggctgagcttttagtgtgatcatcacccaaatagtgtacattgtacccattaattaatttcttatcacctgaccctatttttgttttctcataccaagaaacttcctaagttaaccatcaaaattagtccttctgtcatctctcttagcatacttatttcccttatgtgatgcctaataatgagggaacataaataaagccaaattcaaagataaaaaaaaaaaaaa

SEQ ID NO: 583 - DNA, 7911 bp, Homo sapiens
acccaggagggctgtgctgatagcacgttcctcgagtttactttgctttccttgagtttattgtaaaggggtaaagttttcggatccgtcacgtgaccctgacaggtcctgcctatggcgcggcagaccacccacgccgagggccatggaactgcttaatagaaacaggcttgtaattgtgagtccgcgctgcactccgccgaaagcctccggcggcccagcgcgccggggtttttacactttccgttccttttgtaaagacggaggaggaggagaagaagaagaagaaaacggaggagaagaaaaagacgacaggggagacaaagagacccgcagcgacaaggggaaggctactggccggaaagcgccgctgtggctgagagcgaagtttcagagactcttatttaaactgggttgttacattcaaaaaaactgcggcaagttcttggttgtgggcctcctcatatttggggccttcgcggtgggattaaaagcagcgaacctcgagaccaacgtggaggagctgtgggtggaagttggaggacgagtaagtcgtgaattaaattatactcgccagaagattggagaagaggctatgtttaatcctcaactcatgatacagacccctaaagaagaaggtgctaatgtcctgaccacagaagcgctcctacaacacctggactcggcactccaggccagccgtgtccatgtatacatgtacaacaggcagtggaaattggaacatttgtgttacaaatcaggagagcttatcacagaaacaggttacatggatcagataatagaatatctttacccttgtttgattattacacctttggactgcttctgggaaggggcgaaattacagtctgggacagcatacctcctaggtaaacctcctttgcggtggacaaacttcgaccctttggaattcctggaagagttaaagaaaataaactatcaagtggacagctgggaggaaatgctgaataaggctgaggttggtcatggttacatggaccgcccctgcctcaatccggccgatccagactgccccgccacagcccccaacaaaaattcaaccaaacctcttgatatggcccttgttttgaatggtggatgtcatggcttatccagaaagtatatgcactggcaggaggagttgattgtgggtggcacagtcaagaacagcactggaaaactcgtcagcgcccatgccctgcagaccatgttccagttaatgactcccaagcaaatgtacgagcacttcaaggggtacgagtatgtctcacacatcaactggaacgaggacaaagcggcagccatcctggaggcctggcagaggacatatgtggaggtggttcatcagagtgtcgcacagaactccactcaaaaggtgctttccttcaccaccacgaccctggacgacatcctgaaatccttctctgacgtcagtgtcatccgcgtggccagcggctacttactcatgctcgcctatgcctgtctaaccatgctgcgctgggactgctccaagtcccagggtgccgtggggctggctggcgtcctgctggttgcactgtcagtggctgcaggactgggcctgtgctcattgatcggaatttcctttaacgctgcaacaactcaggttttgccatttctcgctcttggtgttggtgtggatgatgtttttcttctggcccacgccttcagtgaaacaggacagaataaaagaatcccttttgaggacaggaccggggagtgcctgaagcgcacaggagccagcgtggccctcacgtccatcagcaatgtcacagccttcttcatggccgcgttaatcccaattcccgctctgcgggcgttctccctccaggcagcggtagtagtggtgttcaattttgccatggttctgctcatttttcctgcaattctcagcatggatttatatcgacgcgaggacaggagactggatattttctgctgttttacaagcccctgcgtcagcagagtgattcaggttgaacctcaggcctacaccgacacacacgacaatacccgctacagccccccacctccctacagcagccacagctttgcccatgaaacgcagattaccatgcagtccactgtccagctccgcacggagtacgacccccacacgcacgtgtactacaccaccgctgagccgcgctccgagatctctgtgcagcccgtcaccgtgacacaggacaccctcagctgccagagcccagagagcaccagctccacaagggacctgctctcccagttctccgactccagcctccactgcctcgagcccccctgtacgaagtggacactctcatcttttgctgagaagcactatgctcctttcctcttgaaaccaaaagccaaggtagtggtgatcttcctttttctgggcttgctgggggtcagcctttatggcaccacccgagtgagagacgggctggaccttacggacattgtacctcgggaaaccagagaatatgactttattgctgcacaattcaaatacttttctttctacaacatgtatatagtcacccagaaagcagactacccgaatatccagcacttactttacgacctacacaggagtttcagtaacgtgaagtatgtcatgttggaagaaaacaaacagcttcccaaaatgtggctgcactacttcagagactggcttcagggacttcaggatgcatttgacagtgactgggaaaccgggaaaatcatgccaaacaattacaagaatggatcagacgatggagtccttgcctacaaactcctggtgcaaaccggcagccgcgataagcccatcgacatcagccagttgactaaacagcgtctggtggatgcagatggcatcattaatcccagcgctttctacatctacctgacggcttgggtcagcaacgaccccgtcgcgtatgctgcctcccaggccaacatccggccacaccgaccagaatgggtccacgacaaagccgactacatgcctgaaacaaggctgagaatcccggcagcagagcccatcgagtatgcccagttccctttctacctcaacggcttgcgggacacctcagactttgtggaggcaattgaaaaagtaaggaccatctgcagcaactatacgagcctggggctgtccagttaccccaacggctaccccttcctcttctgggagcagtacatcggcctccgccactggctgctgctgttcatcagcgtggtgttggcctgcacattcctcgtgtgcgctgtcttccttctgaacccctggacggccgggatcattgtgatggtcctggcgctgatgacggtcgagctgttcggcatgatgggcctcatcggaatcaagctcagtgccgtgcccgtggtcatcctgatcgcttctgttggcataggagtggagttcaccgttcacgttgctttggcctttctgacggccatcggcgacaagaaccgcagggctgtgcttgccctggagcacatgtttgcacccgtcctggatggcgccgtgtccactctgctgggagtgctgatgctggcgggatctgagttcgacttcattgtcaggtatttctttgctgtgctggcgatcctcaccatcctcggcgttctcaatgggctggttttgcttcccgtgcttttgtctttctttggaccatatcctgaggtgtctccagccaacggcttgaaccgcctgcccacaccctcccctgagccaccccccagcgtggtccgcttcgccatgccgcccggccacacgcacagcgggtctgattcctccgactcggagtatagttcccagacgacagtgtcaggcctcagcgaggagcttcggcactacgaggcccagcagggcgcgggaggccctgcccaccaagtgatcgtggaagccacagaaaaccccgtcttcgcccactccactgtggtccatcccgaatccaggcatcacccaccctcgaacccgagacagcagccccacctggactcagggtccctgcctcccggacggcaaggccagcagccccgcagggacccccccagagaaggcttgtggccacccccctacagaccgcgcagagacgcttttgaaatttctactgaagggcattctggccctagcaatagggcccgctggggccctcgcggggcccgttctcacaaccctcggaacccagcgtccactgccatgggcagctccgtgcccggctactgccagcccatcaccactgtgacggcttctgcctccgtgactgtcgccgtgcacccgccgcctgtccctgggcctgggcggaacccccgagggggactctgcccaggctaccctgagactgaccacggcctgtttgaggacccccacgtgcctttccacgtccggtgtgagaggagggattcgaaggtggaagtcattgagctgcaggacgtggaatgcgaggagaggccccggggaagcagctccaactgagggtgattaaaatctgaagcaaagaggccaaagattggaaaccccccacccccacctctttccagaactgcttgaagagaactggttggagttatggaaaagatgccctgtgccaggacagcagttcattgttactgtaaccgattgtattattttgttaaatatttctataaatatttaagagatgtacacatgtgtaatataggaaggaaggatgtaaagtggtatgatctggggcttctccactcctgccccagagtgtggaggccacagtggggcctctccgtatttgtgcattgggctccgtgccacaaccaagcttcattagtcttaaatttcagcatatgttgctgctgcttaaatattgtataatttacttgtataattctatgcaaatattgcttatgtaataggattattttgtaaaggtttctgtttaaaatattttaaatttgcatatcacaaccctgtggtagtatgaaatgttactgttaactttcaaacacgctatgcgtgataatttttttgtttaatgagcagatatgaagaaagcacgttaatcctggtggcttctctaggtgtcgttgtgtgcggtcctcttgtttggctgtgcgtgtgaacacgtgtgtgagttcaccatgtactgtactgtgattttttttttgtcttgttttgtttctctacactgtctgtaacctgtagtaggctctgacctagtcaggctggaagcgtcaggatatcttttcttcgtgctggtgagggctggccctaaacatccacctaatcctttcaaatcagcccggcaaaagctagactctcctcgtgtctacggcatctcttatgatcattggctgccatccaggaccccaatttgtgcttcagggggataatctccttctctcggatcattgtgatggatgctggaacctcagggtatggagctcacatcagttcatcatggtgggtgttagagaattcggtgacatgcctagtgctgagccttggctgggccatgagagtctgtatactctaaaaagcatgcagcatggtgcccctcttctgaccaacacacacacgacccctcccccaacacccccaaattcaagagtggatgtggccctgtcacaggtagaaaaacctatttagttaattctttcttggcccacagtctcccagaaatgatgttttgagtccctatagtttaaactccctctcttaaatggagcagctggttgaggctttctagatctgtttgcatcttctttaaaactaagtggtgagcatgcattgtggtgtagaggcaggcattatgtaggataagagctccggggggattcttcatgcaccagtgtttagggtacgtgcttcctaagtaaatccaaacattgtctccatcctccccgtcattagtgctctttcaatgtgatgtgggaaagcaggaggatggacacaccccactgaaagatgtaggcaggggcaggtctctcaaccaggcatatttttaaaagttgcttctgtactggttctcttcttttgctctgaggtgtgggctccctcatctcgtaaccagagaccagcacatgtcagggaagcacccagtgtcggctccccatccaaatccacaccagcaccttgttacagacaagaagtcagaggaaagggcggggtccctgcagggctgaagcctaagctactgtgaggcgctcacgagtggcagctcctgttactcccttttaaattacctgggaaatcttaacagaaaggtaatgggcccccagaaatacccacagcatagtgacctcagaccctgatactcaccacaaaacttttaagatgctgattgggagccgcttgtggctgctgggtgtgtgtgtgtgtgtgtgcgtgcgtgcgtgtgtgtgtgtctctgctggggaccctggccacccccctgctgctgtcttggtgcctgtcacccacatggtctgccatcctaacacccagctctgctcagaaaacgtcctgcgtggaggagggatgatgcagaattctgaagtcgacttccctctggctcctggcgtgccctcgctcccttcctgagcccagctcgtgttgcgccggaggctgcgcggcccctgatttctgcatggtgtagaactttctccaatagtcacattggcaaagggagaactggggtgggcggggggtggggctggcagggaattagaatttctctctctcttttaatagttttattttgtctgtcctgtttgttcatttggatgttttaatttttaaaaaaaaaaaaactttgctgatatttataattttgtatcataagaatgttttcctctacagtatttgtcatgccagtttataacaaaaaaaaatgcagggattttatttctattggaaacattacagctatgttttacttttggacagaatttttatttgtatagagtgcttactaatgttaaatagttcagagtatataacatttacattaaggactcatggtaggttttagggtaaggagtttaaaggaaataaatattcaaactgggtctcattgccaattttggtggaaatgagtttgtgtcatttcaattacaaagataaaagtatgccatataatttatttatatgaagatttatttttgtagtgtacatagtagtcatcaagtcttttgacagaagtatatttttaaagaatttatatgtgatgaatccataatgtctggaactttgctgagacatgagtgggcacagttttcattgtaaattacagcaaggaaagaaaatgtttaacagtgttaagagagtcagagcagagtggatattcatgcgattatgaagtgtttattagttaccattggcgacctagcatgcttctcatttcaaaccttggaaggtgaaaatgtacaaactctctaaataattaatgttcaaacactgatagaaattctaacatgaataaaaaataatataacttgttggttatatctttgtttgtagaatgctttttttctttaaaatacttgggagagacagttagtgttggagccatcagaaactgttgtttcatcttgctgaccttgtgacactcttcttttttgctctatctgatggagagagttttaggttttcctcctttttgttttgtataaatagtgggtataagcatagctctgttacatggatgtattacaaagtgggggctgagcttttagtgtgatcatcacccaaatagtgtacattgtacccattaattaatttcttatcacctgaccctatttttgttttctcataccaagaaacttcctaagttaaccatcaaaattagtccttctgtcatctctcttagcatacttatttcccttatgtgatgcctaataatgagggaacataaataaagccaaattcaaagataaaaaaaaaaaaaa

SEQ ID NO: 584 - DNA, 7957 bp, Homo sapiens
gcgcccgccgtgtgagcagcagcagcggctggtctgtcaaccggagcccgagcccgagcagcctgcggccagcagcgtcctcgcaagccgagcgcccaggcgcgccaggagcccgcagcagcggcagcagcgcgccgggccgcccgggaagcctccgtccccgcggcggcggcggcggcggcggcaacatggcctcggctggtaacgccgccgagccccaggaccgcggcggcggcggcagcggctgtatcggtgccccgggacggccggctggaggcgggaggcgcagacggacgggggggctgcgccgtgctgccgcgccggaccgggactatctgcaccggcccagctactgcgacgccgccttcgctctggagcagatttccaaggggaaggctactggccggaaagcgccgctgtggctgagagcgaagtttcagagactcttatttaaactgggttgttacattcaaaaaaactgcggcaagttcttggttgtgggcctcctcatatttggggccttcgcggtgggattaaaagcagcgaacctcgagaccaacgtggaggagctgtgggtggaagttggaggacgagtaagtcgtgaattaaattatactcgccagaagattggagaagaggctatgtttaatcctcaactcatgatacagacccctaaagaagaaggtgctaatgtcctgaccacagaagcgctcctacaacacctggactcggcactccaggccagccgtgtccatgtatacatgtacaacaggcagtggaaattggaacatttgtgttacaaatcaggagagcttatcacagaaacaggttacatggatcagataatagaatatctttacccttgtttgattattacacctttggactgcttctgggaaggggcgaaattacagtctgggacagcatacctcctaggtaaacctcctttgcggtggacaaacttcgaccctttggaattcctggaagagttaaagaaaataaactatcaagtggacagctgggaggaaatgctgaataaggctgaggttggtcatggttacatggaccgcccctgcctcaatccggccgatccagactgccccgccacagcccccaacaaaaattcaaccaaacctcttgatatggcccttgttttgaatggtggatgtcatggcttatccagaaagtatatgcactggcaggaggagttgattgtgggtggcacagtcaagaacagcactggaaaactcgtcagcgcccatgccctgcagaccatgttccagttaatgactcccaagcaaatgtacgagcacttcaaggggtacgagtatgtctcacacatcaactggaacgaggacaaagcggcagccatcctggaggcctggcagaggacatatgtggaggtggttcatcagagtgtcgcacagaactccactcaaaaggtgctttccttcaccaccacgaccctggacgacatcctgaaatccttctctgacgtcagtgtcatccgcgtggccagcggctacttactcatgctcgcctatgcctgtctaaccatgctgcgctgggactgctccaagtcccagggtgccgtggggctggctggcgtcctgctggttgcactgtcagtggctgcaggactgggcctgtgctcattgatcggaatttcctttaacgctgcaacaactcaggttttgccatttctcgctcttggtgttggtgtggatgatgtttttcttctggcccacgccttcagtgaaacaggacagaataaaagaatcccttttgaggacaggaccggggagtgcctgaagcgcacaggagccagcgtggccctcacgtccatcagcaatgtcacagccttcttcatggccgcgttaatcccaattcccgctctgcgggcgttctccctccaggcagcggtagtagtggtgttcaattttgccatggttctgctcatttttcctgcaattctcagcatggatttatatcgacgcgaggacaggagactggatattttctgctgttttacaagcccctgcgtcagcagagtgattcaggttgaacctcaggcctacaccgacacacacgacaatacccgctacagccccccacctccctacagcagccacagctttgcccatgaaacgcagattaccatgcagtccactgtccagctccgcacggagtacgacccccacacgcacgtgtactacaccaccgctgagccgcgctccgagatctctgtgcagcccgtcaccgtgacacaggacaccctcagctgccagagcccagagagcaccagctccacaagggacctgctctcccagttctccgactccagcctccactgcctcgagcccccctgtacgaagtggacactctcatcttttgctgagaagcactatgctcctttcctcttgaaaccaaaagccaaggtagtggtgatcttcctttttctgggcttgctgggggtcagcctttatggcaccacccgagtgagagacgggctggaccttacggacattgtacctcgggaaaccagagaatatgactttattgctgcacaattcaaatacttttctttctacaacatgtatatagtcacccagaaagcagactacccgaatatccagcacttactttacgacctacacaggagtttcagtaacgtgaagtatgtcatgttggaagaaaacaaacagcttcccaaaatgtggctgcactacttcagagactggcttcagggacttcaggatgcatttgacagtgactgggaaaccgggaaaatcatgccaaacaattacaagaatggatcagacgatggagtccttgcctacaaactcctggtgcaaaccggcagccgcgataagcccatcgacatcagccagttgactaaacagcgtctggtggatgcagatggcatcattaatcccagcgctttctacatctacctgacggcttgggtcagcaacgaccccgtcgcgtatgctgcctcccaggccaacatccggccacaccgaccagaatgggtccacgacaaagccgactacatgcctgaaacaaggctgagaatcccggcagcagagcccatcgagtatgcccagttccctttctacctcaacggcttgcgggacacctcagactttgtggaggcaattgaaaaagtaaggaccatctgcagcaactatacgagcctggggctgtccagttaccccaacggctaccccttcctcttctgggagcagtacatcggcctccgccactggctgctgctgttcatcagcgtggtgttggcctgcacattcctcgtgtgcgctgtcttccttctgaacccctggacggccgggatcattgtgatggtcctggcgctgatgacggtcgagctgttcggcatgatgggcctcatcggaatcaagctcagtgccgtgcccgtggtcatcctgatcgcttctgttggcataggagtggagttcaccgttcacgttgctttggcctttctgacggccatcggcgacaagaaccgcagggctgtgcttgccctggagcacatgtttgcacccgtcctggatggcgccgtgtccactctgctgggagtgctgatgctggcgggatctgagttcgacttcattgtcaggtatttctttgctgtgctggcgatcctcaccatcctcggcgttctcaatgggctggttttgcttcccgtgcttttgtctttctttggaccatatcctgaggtgtctccagccaacggcttgaaccgcctgcccacaccctcccctgagccaccccccagcgtggtccgcttcgccatgccgcccggccacacgcacagcgggtctgattcctccgactcggagtatagttcccagacgacagtgtcaggcctcagcgaggagcttcggcactacgaggcccagcagggcgcgggaggccctgcccaccaagtgatcgtggaagccacagaaaaccccgtcttcgcccactccactgtggtccatcccgaatccaggcatcacccaccctcgaacccgagacagcagccccacctggactcagggtccctgcctcccggacggcaaggccagcagccccgcagggacccccccagagaaggcttgtggccacccccctacagaccgcgcagagacgcttttgaaatttctactgaagggcattctggccctagcaatagggcccgctggggccctcgcggggcccgttctcacaaccctcggaacccagcgtccactgccatgggcagctccgtgcccggctactgccagcccatcaccactgtgacggcttctgcctccgtgactgtcgccgtgcacccgccgcctgtccctgggcctgggcggaacccccgagggggactctgcccaggctaccctgagactgaccacggcctgtttgaggacccccacgtgcctttccacgtccggtgtgagaggagggattcgaaggtggaagtcattgagctgcaggacgtggaatgcgaggagaggccccggggaagcagctccaactgagggtgattaaaatctgaagcaaagaggccaaagattggaaaccccccacccccacctctttccagaactgcttgaagagaactggttggagttatggaaaagatgccctgtgccaggacagcagttcattgttactgtaaccgattgtattattttgttaaatatttctataaatatttaagagatgtacacatgtgtaatataggaaggaaggatgtaaagtggtatgatctggggcttctccactcctgccccagagtgtggaggccacagtggggcctctccgtatttgtgcattgggctccgtgccacaaccaagcttcattagtcttaaatttcagcatatgttgctgctgcttaaatattgtataatttacttgtataattctatgcaaatattgcttatgtaataggattattttgtaaaggtttctgtttaaaatattttaaatttgcatatcacaaccctgtggtagtatgaaatgttactgttaactttcaaacacgctatgcgtgataatttttttgtttaatgagcagatatgaagaaagcacgttaatcctggtggcttctctaggtgtcgttgtgtgcggtcctcttgtttggctgtgcgtgtgaacacgtgtgtgagttcaccatgtactgtactgtgattttttttttgtcttgttttgtttctctacactgtctgtaacctgtagtaggctctgacctagtcaggctggaagcgtcaggatatcttttcttcgtgctggtgagggctggccctaaacatccacctaatcctttcaaatcagcccggcaaaagctagactctcctcgtgtctacggcatctcttatgatcattggctgccatccaggaccccaatttgtgcttcagggggataatctccttctctcggatcattgtgatggatgctggaacctcagggtatggagctcacatcagttcatcatggtgggtgttagagaattcggtgacatgcctagtgctgagccttggctgggccatgagagtctgtatactctaaaaagcatgcagcatggtgcccctcttctgaccaacacacacacgacccctcccccaacacccccaaattcaagagtggatgtggccctgtcacaggtagaaaaacctatttagttaattctttcttggcccacagtctcccagaaatgatgttttgagtccctatagtttaaactccctctcttaaatggagcagctggttgaggctttctagatctgtttgcatcttctttaaaactaagtggtgagcatgcattgtggtgtagaggcaggcattatgtaggataagagctccggggggattcttcatgcaccagtgtttagggtacgtgcttcctaagtaaatccaaacattgtctccatcctccccgtcattagtgctctttcaatgtgatgtgggaaagcaggaggatggacacaccccactgaaagatgtaggcaggggcaggtctctcaaccaggcatatttttaaaagttgcttctgtactggttctcttcttttgctctgaggtgtgggctccctcatctcgtaaccagagaccagcacatgtcagggaagcacccagtgtcggctccccatccaaatccacaccagcaccttgttacagacaagaagtcagaggaaagggcggggtccctgcagggctgaagcctaagctactgtgaggcgctcacgagtggcagctcctgttactcccttttaaattacctgggaaatcttaacagaaaggtaatgggcccccagaaatacccacagcatagtgacctcagaccctgatactcaccacaaaacttttaagatgctgattgggagccgcttgtggctgctgggtgtgtgtgtgtgtgtgtgcgtgcgtgcgtgtgtgtgtgtctctgctggggaccctggccacccccctgctgctgtcttggtgcctgtcacccacatggtctgccatcctaacacccagctctgctcagaaaacgtcctgcgtggaggagggatgatgcagaattctgaagtcgacttccctctggctcctggcgtgccctcgctcccttcctgagcccagctcgtgttgcgccggaggctgcgcggcccctgatttctgcatggtgtagaactttctccaatagtcacattggcaaagggagaactggggtgggcggggggtggggctggcagggaattagaatttctctctctcttttaatagttttattttgtctgtcctgtttgttcatttggatgttttaatttttaaaaaaaaaaaaactttgctgatatttataattttgtatcataagaatgttttcctctacagtatttgtcatgccagtttataacaaaaaaaaatgcagggattttatttctattggaaacattacagctatgttttacttttggacagaatttttatttgtatagagtgcttactaatgttaaatagttcagagtatataacatttacattaaggactcatggtaggttttagggtaaggagtttaaaggaaataaatattcaaactgggtctcattgccaattttggtggaaatgagtttgtgtcatttcaattacaaagataaaagtatgccatataatttatttatatgaagatttatttttgtagtgtacatagtagtcatcaagtcttttgacagaagtatatttttaaagaatttatatgtgatgaatccataatgtctggaactttgctgagacatgagtgggcacagttttcattgtaaattacagcaaggaaagaaaatgtttaacagtgttaagagagtcagagcagagtggatattcatgcgattatgaagtgtttattagttaccattggcgacctagcatgcttctcatttcaaaccttggaaggtgaaaatgtacaaactctctaaataattaatgttcaaacactgatagaaattctaacatgaataaaaaataatataacttgttggttatatctttgtttgtagaatgctttttttctttaaaatacttgggagagacagttagtgttggagccatcagaaactgttgtttcatcttgctgaccttgtgacactcttcttttttgctctatctgatggagagagttttaggttttcctcctttttgttttgtataaatagtgggtataagcatagctctgttacatggatgtattacaaagtgggggctgagcttttagtgtgatcatcacccaaatagtgtacattgtacccattaattaatttcttatcacctgaccctatttttgttttctcataccaagaaacttcctaagttaaccatcaaaattagtccttctgtcatctctcttagcatacttatttcccttatgtgatgcctaataatgagggaacataaataaagccaaattcaaagataaaaaaaaaaaaaa

SEQ ID NO: 585 - DNA, 7675 bp, Homo sapiens
actcacacctctccaggaaaagcagcagacaaatggggattgaaaaattcaaaccctccctctggtcctgggaggaaagggctgtctgaggtccgcagggggtggaggggaaggctactggccggaaagcgccgctgtggctgagagcgaagtttcagagactcttatttaaactgggttgttacattcaaaaaaactgcggcaagttcttggttgtgggcctcctcatatttggggccttcgcggtgggattaaaagcagcgaacctcgagaccaacgtggaggagctgtgggtggaagttggaggacgagtaagtcgtgaattaaattatactcgccagaagattggagaagaggctatgtttaatcctcaactcatgatacagacccctaaagaagaaggtgctaatgtcctgaccacagaagcgctcctacaacacctggactcggcactccaggccagccgtgtccatgtatacatgtacaacaggcagtggaaattggaacatttgtgttacaaatcaggagagcttatcacagaaacaggttacatggatcagataatagaatatctttacccttgtttgattattacacctttggactgcttctgggaaggggcgaaattacagtctgggacagcatacctcctaggtaaacctcctttgcggtggacaaacttcgaccctttggaattcctggaagagttaaagaaaataaactatcaagtggacagctgggaggaaatgctgaataaggctgaggttggtcatggttacatggaccgcccctgcctcaatccggccgatccagactgccccgccacagcccccaacaaaaattcaaccaaacctcttgatatggcccttgttttgaatggtggatgtcatggcttatccagaaagtatatgcactggcaggaggagttgattgtgggtggcacagtcaagaacagcactggaaaactcgtcagcgcccatgccctgcagaccatgttccagttaatgactcccaagcaaatgtacgagcacttcaaggggtacgagtatgtctcacacatcaactggaacgaggacaaagcggcagccatcctggaggcctggcagaggacatatgtggaggtggttcatcagagtgtcgcacagaactccactcaaaaggtgctttccttcaccaccacgaccctggacgacatcctgaaatccttctctgacgtcagtgtcatccgcgtggccagcggctacttactcatgctcgcctatgcctgtctaaccatgctgcgctgggactgctccaagtcccagggtgccgtggggctggctggcgtcctgctggttgcactgtcagtggctgcaggactgggcctgtgctcattgatcggaatttcctttaacgctgcaacaactcaggttttgccatttctcgctcttggtgttggtgtggatgatgtttttcttctggcccacgccttcagtgaaacaggacagaataaaagaatcccttttgaggacaggaccggggagtgcctgaagcgcacaggagccagcgtggccctcacgtccatcagcaatgtcacagccttcttcatggccgcgttaatcccaattcccgctctgcgggcgttctccctccaggcagcggtagtagtggtgttcaattttgccatggttctgctcatttttcctgcaattctcagcatggatttatatcgacgcgaggacaggagactggatattttctgctgttttacaagcccctgcgtcagcagagtgattcaggttgaacctcaggcctacaccgacacacacgacaatacccgctacagccccccacctccctacagcagccacagctttgcccatgaaacgcagattaccatgcagtccactgtccagctccgcacggagtacgacccccacacgcacgtgtactacaccaccgctgagccgcgctccgagatctctgtgcagcccgtcaccgtgacacaggacaccctcagctgccagagcccagagagcaccagctccacaagggacctgctctcccagttctccgactccagcctccactgcctcgagcccccctgtacgaagtggacactctcatcttttgctgagaagcactatgctcctttcctcttgaaaccaaaagccaaggtagtggtgatcttcctttttctgggcttgctgggggtcagcctttatggcaccacccgagtgagagacgggctggaccttacggacattgtacctcgggaaaccagagaatatgactttattgctgcacaattcaaatacttttctttctacaacatgtatatagtcacccagaaagcagactacccgaatatccagcacttactttacgacctacacaggagtttcagtaacgtgaagtatgtcatgttggaagaaaacaaacagcttcccaaaatgtggctgcactacttcagagactggcttcagggacttcaggatgcatttgacagtgactgggaaaccgggaaaatcatgccaaacaattacaagaatggatcagacgatggagtccttgcctacaaactcctggtgcaaaccggcagccgcgataagcccatcgacatcagccagttgactaaacagcgtctggtggatgcagatggcatcattaatcccagcgctttctacatctacctgacggcttgggtcagcaacgaccccgtcgcgtatgctgcctcccaggccaacatccggccacaccgaccagaatgggtccacgacaaagccgactacatgcctgaaacaaggctgagaatcccggcagcagagcccatcgagtatgcccagttccctttctacctcaacggcttgcgggacacctcagactttgtggaggcaattgaaaaagtaaggaccatctgcagcaactatacgagcctggggctgtccagttaccccaacggctaccccttcctcttctgggagcagtacatcggcctccgccactggctgctgctgttcatcagcgtggtgttggcctgcacattcctcgtgtgcgctgtcttccttctgaacccctggacggccgggatcattgtgatggtcctggcgctgatgacggtcgagctgttcggcatgatgggcctcatcggaatcaagctcagtgccgtgcccgtggtcatcctgatcgcttctgttggcataggagtggagttcaccgttcacgttgctttggcctttctgacggccatcggcgacaagaaccgcagggctgtgcttgccctggagcacatgtttgcacccgtcctggatggcgccgtgtccactctgctgggagtgctgatgctggcgggatctgagttcgacttcattgtcaggtatttctttgctgtgctggcgatcctcaccatcctcggcgttctcaatgggctggttttgcttcccgtgcttttgtctttctttggaccatatcctgaggtgtctccagccaacggcttgaaccgcctgcccacaccctcccctgagccaccccccagcgtggtccgcttcgccatgccgcccggccacacgcacagcgggtctgattcctccgactcggagtatagttcccagacgacagtgtcaggcctcagcgaggagcttcggcactacgaggcccagcagggcgcgggaggccctgcccaccaagtgatcgtggaagccacagaaaaccccgtcttcgcccactccactgtggtccatcccgaatccaggcatcacccaccctcgaacccgagacagcagccccacctggactcagggtccctgcctcccggacggcaaggccagcagccccgcagggacccccccagagaaggcttgtggccacccccctacagaccgcgcagagacgcttttgaaatttctactgaagggcattctggccctagcaatagggcccgctggggccctcgcggggcccgttctcacaaccctcggaacccagcgtccactgccatgggcagctccgtgcccggctactgccagcccatcaccactgtgacggcttctgcctccgtgactgtcgccgtgcacccgccgcctgtccctgggcctgggcggaacccccgagggggactctgcccaggctaccctgagactgaccacggcctgtttgaggacccccacgtgcctttccacgtccggtgtgagaggagggattcgaaggtggaagtcattgagctgcaggacgtggaatgcgaggagaggccccggggaagcagctccaactgagggtgattaaaatctgaagcaaagaggccaaagattggaaaccccccacccccacctctttccagaactgcttgaagagaactggttggagttatggaaaagatgccctgtgccaggacagcagttcattgttactgtaaccgattgtattattttgttaaatatttctataaatatttaagagatgtacacatgtgtaatataggaaggaaggatgtaaagtggtatgatctggggcttctccactcctgccccagagtgtggaggccacagtggggcctctccgtatttgtgcattgggctccgtgccacaaccaagcttcattagtcttaaatttcagcatatgttgctgctgcttaaatattgtataatttacttgtataattctatgcaaatattgcttatgtaataggattattttgtaaaggtttctgtttaaaatattttaaatttgcatatcacaaccctgtggtagtatgaaatgttactgttaactttcaaacacgctatgcgtgataatttttttgtttaatgagcagatatgaagaaagcacgttaatcctggtggcttctctaggtgtcgttgtgtgcggtcctcttgtttggctgtgcgtgtgaacacgtgtgtgagttcaccatgtactgtactgtgattttttttttgtcttgttttgtttctctacactgtctgtaacctgtagtaggctctgacctagtcaggctggaagcgtcaggatatcttttcttcgtgctggtgagggctggccctaaacatccacctaatcctttcaaatcagcccggcaaaagctagactctcctcgtgtctacggcatctcttatgatcattggctgccatccaggaccccaatttgtgcttcagggggataatctccttctctcggatcattgtgatggatgctggaacctcagggtatggagctcacatcagttcatcatggtgggtgttagagaattcggtgacatgcctagtgctgagccttggctgggccatgagagtctgtatactctaaaaagcatgcagcatggtgcccctcttctgaccaacacacacacgacccctcccccaacacccccaaattcaagagtggatgtggccctgtcacaggtagaaaaacctatttagttaattctttcttggcccacagtctcccagaaatgatgttttgagtccctatagtttaaactccctctcttaaatggagcagctggttgaggctttctagatctgtttgcatcttctttaaaactaagtggtgagcatgcattgtggtgtagaggcaggcattatgtaggataagagctccggggggattcttcatgcaccagtgtttagggtacgtgcttcctaagtaaatccaaacattgtctccatcctccccgtcattagtgctctttcaatgtgatgtgggaaagcaggaggatggacacaccccactgaaagatgtaggcaggggcaggtctctcaaccaggcatatttttaaaagttgcttctgtactggttctcttcttttgctctgaggtgtgggctccctcatctcgtaaccagagaccagcacatgtcagggaagcacccagtgtcggctccccatccaaatccacaccagcaccttgttacagacaagaagtcagaggaaagggcggggtccctgcagggctgaagcctaagctactgtgaggcgctcacgagtggcagctcctgttactcccttttaaattacctgggaaatcttaacagaaaggtaatgggcccccagaaatacccacagcatagtgacctcagaccctgatactcaccacaaaacttttaagatgctgattgggagccgcttgtggctgctgggtgtgtgtgtgtgtgtgtgcgtgcgtgcgtgtgtgtgtgtctctgctggggaccctggccacccccctgctgctgtcttggtgcctgtcacccacatggtctgccatcctaacacccagctctgctcagaaaacgtcctgcgtggaggagggatgatgcagaattctgaagtcgacttccctctggctcctggcgtgccctcgctcccttcctgagcccagctcgtgttgcgccggaggctgcgcggcccctgatttctgcatggtgtagaactttctccaatagtcacattggcaaagggagaactggggtgggcggggggtggggctggcagggaattagaatttctctctctcttttaatagttttattttgtctgtcctgtttgttcatttggatgttttaatttttaaaaaaaaaaaaactttgctgatatttataattttgtatcataagaatgttttcctctacagtatttgtcatgccagtttataacaaaaaaaaatgcagggattttatttctattggaaacattacagctatgttttacttttggacagaatttttatttgtatagagtgcttactaatgttaaatagttcagagtatataacatttacattaaggactcatggtaggttttagggtaaggagtttaaaggaaataaatattcaaactgggtctcattgccaattttggtggaaatgagtttgtgtcatttcaattacaaagataaaagtatgccatataatttatttatatgaagatttatttttgtagtgtacatagtagtcatcaagtcttttgacagaagtatatttttaaagaatttatatgtgatgaatccataatgtctggaactttgctgagacatgagtgggcacagttttcattgtaaattacagcaaggaaagaaaatgtttaacagtgttaagagagtcagagcagagtggatattcatgcgattatgaagtgtttattagttaccattggcgacctagcatgcttctcatttcaaaccttggaaggtgaaaatgtacaaactctctaaataattaatgttcaaacactgatagaaattctaacatgaataaaaaataatataacttgttggttatatctttgtttgtagaatgctttttttctttaaaatacttgggagagacagttagtgttggagccatcagaaactgttgtttcatcttgctgaccttgtgacactcttcttttttgctctatctgatggagagagttttaggttttcctcctttttgttttgtataaatagtgggtataagcatagctctgttacatggatgtattacaaagtgggggctgagcttttagtgtgatcatcacccaaatagtgtacattgtacccattaattaatttcttatcacctgaccctatttttgttttctcataccaagaaacttcctaagttaaccatcaaaattagtccttctgtcatctctcttagcatacttatttcccttatgtgatgcctaataatgagggaacataaataaagccaaattcaaagataaaaaaaaaaaaaa

SEQ ID NO: 586 - DNA, 7658 bp, Homo sapiens
actcacacctctccaggaaaagcagcagacaaatggggattgaaaaattcaaaccctccctctggtcctgggaggaaagggctgtctgaggggaaggctactggccggaaagcgccgctgtggctgagagcgaagtttcagagactcttatttaaactgggttgttacattcaaaaaaactgcggcaagttcttggttgtgggcctcctcatatttggggccttcgcggtgggattaaaagcagcgaacctcgagaccaacgtggaggagctgtgggtggaagttggaggacgagtaagtcgtgaattaaattatactcgccagaagattggagaagaggctatgtttaatcctcaactcatgatacagacccctaaagaagaaggtgctaatgtcctgaccacagaagcgctcctacaacacctggactcggcactccaggccagccgtgtccatgtatacatgtacaacaggcagtggaaattggaacatttgtgttacaaatcaggagagcttatcacagaaacaggttacatggatcagataatagaatatctttacccttgtttgattattacacctttggactgcttctgggaaggggcgaaattacagtctgggacagcatacctcctaggtaaacctcctttgcggtggacaaacttcgaccctttggaattcctggaagagttaaagaaaataaactatcaagtggacagctgggaggaaatgctgaataaggctgaggttggtcatggttacatggaccgcccctgcctcaatccggccgatccagactgccccgccacagcccccaacaaaaattcaaccaaacctcttgatatggcccttgttttgaatggtggatgtcatggcttatccagaaagtatatgcactggcaggaggagttgattgtgggtggcacagtcaagaacagcactggaaaactcgtcagcgcccatgccctgcagaccatgttccagttaatgactcccaagcaaatgtacgagcacttcaaggggtacgagtatgtctcacacatcaactggaacgaggacaaagcggcagccatcctggaggcctggcagaggacatatgtggaggtggttcatcagagtgtcgcacagaactccactcaaaaggtgctttccttcaccaccacgaccctggacgacatcctgaaatccttctctgacgtcagtgtcatccgcgtggccagcggctacttactcatgctcgcctatgcctgtctaaccatgctgcgctgggactgctccaagtcccagggtgccgtggggctggctggcgtcctgctggttgcactgtcagtggctgcaggactgggcctgtgctcattgatcggaatttcctttaacgctgcaacaactcaggttttgccatttctcgctcttggtgttggtgtggatgatgtttttcttctggcccacgccttcagtgaaacaggacagaataaaagaatcccttttgaggacaggaccggggagtgcctgaagcgcacaggagccagcgtggccctcacgtccatcagcaatgtcacagccttcttcatggccgcgttaatcccaattcccgctctgcgggcgttctccctccaggcagcggtagtagtggtgttcaattttgccatggttctgctcatttttcctgcaattctcagcatggatttatatcgacgcgaggacaggagactggatattttctgctgttttacaagcccctgcgtcagcagagtgattcaggttgaacctcaggcctacaccgacacacacgacaatacccgctacagccccccacctccctacagcagccacagctttgcccatgaaacgcagattaccatgcagtccactgtccagctccgcacggagtacgacccccacacgcacgtgtactacaccaccgctgagccgcgctccgagatctctgtgcagcccgtcaccgtgacacaggacaccctcagctgccagagcccagagagcaccagctccacaagggacctgctctcccagttctccgactccagcctccactgcctcgagcccccctgtacgaagtggacactctcatcttttgctgagaagcactatgctcctttcctcttgaaaccaaaagccaaggtagtggtgatcttcctttttctgggcttgctgggggtcagcctttatggcaccacccgagtgagagacgggctggaccttacggacattgtacctcgggaaaccagagaatatgactttattgctgcacaattcaaatacttttctttctacaacatgtatatagtcacccagaaagcagactacccgaatatccagcacttactttacgacctacacaggagtttcagtaacgtgaagtatgtcatgttggaagaaaacaaacagcttcccaaaatgtggctgcactacttcagagactggcttcagggacttcaggatgcatttgacagtgactgggaaaccgggaaaatcatgccaaacaattacaagaatggatcagacgatggagtccttgcctacaaactcctggtgcaaaccggcagccgcgataagcccatcgacatcagccagttgactaaacagcgtctggtggatgcagatggcatcattaatcccagcgctttctacatctacctgacggcttgggtcagcaacgaccccgtcgcgtatgctgcctcccaggccaacatccggccacaccgaccagaatgggtccacgacaaagccgactacatgcctgaaacaaggctgagaatcccggcagcagagcccatcgagtatgcccagttccctttctacctcaacggcttgcgggacacctcagactttgtggaggcaattgaaaaagtaaggaccatctgcagcaactatacgagcctggggctgtccagttaccccaacggctaccccttcctcttctgggagcagtacatcggcctccgccactggctgctgctgttcatcagcgtggtgttggcctgcacattcctcgtgtgcgctgtcttccttctgaacccctggacggccgggatcattgtgatggtcctggcgctgatgacggtcgagctgttcggcatgatgggcctcatcggaatcaagctcagtgccgtgcccgtggtcatcctgatcgcttctgttggcataggagtggagttcaccgttcacgttgctttggcctttctgacggccatcggcgacaagaaccgcagggctgtgcttgccctggagcacatgtttgcacccgtcctggatggcgccgtgtccactctgctgggagtgctgatgctggcgggatctgagttcgacttcattgtcaggtatttctttgctgtgctggcgatcctcaccatcctcggcgttctcaatgggctggttttgcttcccgtgcttttgtctttctttggaccatatcctgaggtgtctccagccaacggcttgaaccgcctgcccacaccctcccctgagccaccccccagcgtggtccgcttcgccatgccgcccggccacacgcacagcgggtctgattcctccgactcggagtatagttcccagacgacagtgtcaggcctcagcgaggagcttcggcactacgaggcccagcagggcgcgggaggccctgcccaccaagtgatcgtggaagccacagaaaaccccgtcttcgcccactccactgtggtccatcccgaatccaggcatcacccaccctcgaacccgagacagcagccccacctggactcagggtccctgcctcccggacggcaaggccagcagccccgcagggacccccccagagaaggcttgtggccacccccctacagaccgcgcagagacgcttttgaaatttctactgaagggcattctggccctagcaatagggcccgctggggccctcgcggggcccgttctcacaaccctcggaacccagcgtccactgccatgggcagctccgtgcccggctactgccagcccatcaccactgtgacggcttctgcctccgtgactgtcgccgtgcacccgccgcctgtccctgggcctgggcggaacccccgagggggactctgcccaggctaccctgagactgaccacggcctgtttgaggacccccacgtgcctttccacgtccggtgtgagaggagggattcgaaggtggaagtcattgagctgcaggacgtggaatgcgaggagaggccccggggaagcagctccaactgagggtgattaaaatctgaagcaaagaggccaaagattggaaaccccccacccccacctctttccagaactgcttgaagagaactggttggagttatggaaaagatgccctgtgccaggacagcagttcattgttactgtaaccgattgtattattttgttaaatatttctataaatatttaagagatgtacacatgtgtaatataggaaggaaggatgtaaagtggtatgatctggggcttctccactcctgccccagagtgtggaggccacagtggggcctctccgtatttgtgcattgggctccgtgccacaaccaagcttcattagtcttaaatttcagcatatgttgctgctgcttaaatattgtataatttacttgtataattctatgcaaatattgcttatgtaataggattattttgtaaaggtttctgtttaaaatattttaaatttgcatatcacaaccctgtggtagtatgaaatgttactgttaactttcaaacacgctatgcgtgataatttttttgtttaatgagcagatatgaagaaagcacgttaatcctggtggcttctctaggtgtcgttgtgtgcggtcctcttgtttggctgtgcgtgtgaacacgtgtgtgagttcaccatgtactgtactgtgattttttttttgtcttgttttgtttctctacactgtctgtaacctgtagtaggctctgacctagtcaggctggaagcgtcaggatatcttttcttcgtgctggtgagggctggccctaaacatccacctaatcctttcaaatcagcccggcaaaagctagactctcctcgtgtctacggcatctcttatgatcattggctgccatccaggaccccaatttgtgcttcagggggataatctccttctctcggatcattgtgatggatgctggaacctcagggtatggagctcacatcagttcatcatggtgggtgttagagaattcggtgacatgcctagtgctgagccttggctgggccatgagagtctgtatactctaaaaagcatgcagcatggtgcccctcttctgaccaacacacacacgacccctcccccaacacccccaaattcaagagtggatgtggccctgtcacaggtagaaaaacctatttagttaattctttcttggcccacagtctcccagaaatgatgttttgagtccctatagtttaaactccctctcttaaatggagcagctggttgaggctttctagatctgtttgcatcttctttaaaactaagtggtgagcatgcattgtggtgtagaggcaggcattatgtaggataagagctccggggggattcttcatgcaccagtgtttagggtacgtgcttcctaagtaaatccaaacattgtctccatcctccccgtcattagtgctctttcaatgtgatgtgggaaagcaggaggatggacacaccccactgaaagatgtaggcaggggcaggtctctcaaccaggcatatttttaaaagttgcttctgtactggttctcttcttttgctctgaggtgtgggctccctcatctcgtaaccagagaccagcacatgtcagggaagcacccagtgtcggctccccatccaaatccacaccagcaccttgttacagacaagaagtcagaggaaagggcggggtccctgcagggctgaagcctaagctactgtgaggcgctcacgagtggcagctcctgttactcccttttaaattacctgggaaatcttaacagaaaggtaatgggcccccagaaatacccacagcatagtgacctcagaccctgatactcaccacaaaacttttaagatgctgattgggagccgcttgtggctgctgggtgtgtgtgtgtgtgtgtgcgtgcgtgcgtgtgtgtgtgtctctgctggggaccctggccacccccctgctgctgtcttggtgcctgtcacccacatggtctgccatcctaacacccagctctgctcagaaaacgtcctgcgtggaggagggatgatgcagaattctgaagtcgacttccctctggctcctggcgtgccctcgctcccttcctgagcccagctcgtgttgcgccggaggctgcgcggcccctgatttctgcatggtgtagaactttctccaatagtcacattggcaaagggagaactggggtgggcggggggtggggctggcagggaattagaatttctctctctcttttaatagttttattttgtctgtcctgtttgttcatttggatgttttaatttttaaaaaaaaaaaaactttgctgatatttataattttgtatcataagaatgttttcctctacagtatttgtcatgccagtttataacaaaaaaaaatgcagggattttatttctattggaaacattacagctatgttttacttttggacagaatttttatttgtatagagtgcttactaatgttaaatagttcagagtatataacatttacattaaggactcatggtaggttttagggtaaggagtttaaaggaaataaatattcaaactgggtctcattgccaattttggtggaaatgagtttgtgtcatttcaattacaaagataaaagtatgccatataatttatttatatgaagatttatttttgtagtgtacatagtagtcatcaagtcttttgacagaagtatatttttaaagaatttatatgtgatgaatccataatgtctggaactttgctgagacatgagtgggcacagttttcattgtaaattacagcaaggaaagaaaatgtttaacagtgttaagagagtcagagcagagtggatattcatgcgattatgaagtgtttattagttaccattggcgacctagcatgcttctcatttcaaaccttggaaggtgaaaatgtacaaactctctaaataattaatgttcaaacactgatagaaattctaacatgaataaaaaataatataacttgttggttatatctttgtttgtagaatgctttttttctttaaaatacttgggagagacagttagtgttggagccatcagaaactgttgtttcatcttgctgaccttgtgacactcttcttttttgctctatctgatggagagagttttaggttttcctcctttttgttttgtataaatagtgggtataagcatagctctgttacatggatgtattacaaagtgggggctgagcttttagtgtgatcatcacccaaatagtgtacattgtacccattaattaatttcttatcacctgaccctatttttgttttctcataccaagaaacttcctaagttaaccatcaaaattagtccttctgtcatctctcttagcatacttatttcccttatgtgatgcctaataatgagggaacataaataaagccaaattcaaagataaaaaaaaaaaaaa

SEQ ID NO: 587 - DNA, 7757 bp, Homo sapiens
gaaggcgagcacccagacgggggcccgccggggccgcggccagcgccggggaaatgccgcgccggggagcagcctgcgccggcctgagcccttccctttgcactcggctgttttttacgtttaaccagaaaggaagggagaggagggaaagatccatgtggctgccctcttccgatcacaaatattgtcgggaaggctactggccggaaagcgccgctgtggctgagagcgaagtttcagagactcttatttaaactgggttgttacattcaaaaaaactgcggcaagttcttggttgtgggcctcctcatatttggggccttcgcggtgggattaaaagcagcgaacctcgagaccaacgtggaggagctgtgggtggaagttggaggacgagtaagtcgtgaattaaattatactcgccagaagattggagaagaggctatgtttaatcctcaactcatgatacagacccctaaagaagaaggtgctaatgtcctgaccacagaagcgctcctacaacacctggactcggcactccaggccagccgtgtccatgtatacatgtacaacaggcagtggaaattggaacatttgtgttacaaatcaggagagcttatcacagaaacaggttacatggatcagataatagaatatctttacccttgtttgattattacacctttggactgcttctgggaaggggcgaaattacagtctgggacagcatacctcctaggtaaacctcctttgcggtggacaaacttcgaccctttggaattcctggaagagttaaagaaaataaactatcaagtggacagctgggaggaaatgctgaataaggctgaggttggtcatggttacatggaccgcccctgcctcaatccggccgatccagactgccccgccacagcccccaacaaaaattcaaccaaacctcttgatatggcccttgttttgaatggtggatgtcatggcttatccagaaagtatatgcactggcaggaggagttgattgtgggtggcacagtcaagaacagcactggaaaactcgtcagcgcccatgccctgcagaccatgttccagttaatgactcccaagcaaatgtacgagcacttcaaggggtacgagtatgtctcacacatcaactggaacgaggacaaagcggcagccatcctggaggcctggcagaggacatatgtggaggtggttcatcagagtgtcgcacagaactccactcaaaaggtgctttccttcaccaccacgaccctggacgacatcctgaaatccttctctgacgtcagtgtcatccgcgtggccagcggctacttactcatgctcgcctatgcctgtctaaccatgctgcgctgggactgctccaagtcccagggtgccgtggggctggctggcgtcctgctggttgcactgtcagtggctgcaggactgggcctgtgctcattgatcggaatttcctttaacgctgcaacaactcaggttttgccatttctcgctcttggtgttggtgtggatgatgtttttcttctggcccacgccttcagtgaaacaggacagaataaaagaatcccttttgaggacaggaccggggagtgcctgaagcgcacaggagccagcgtggccctcacgtccatcagcaatgtcacagccttcttcatggccgcgttaatcccaattcccgctctgcgggcgttctccctccaggcagcggtagtagtggtgttcaattttgccatggttctgctcatttttcctgcaattctcagcatggatttatatcgacgcgaggacaggagactggatattttctgctgttttacaagcccctgcgtcagcagagtgattcaggttgaacctcaggcctacaccgacacacacgacaatacccgctacagccccccacctccctacagcagccacagctttgcccatgaaacgcagattaccatgcagtccactgtccagctccgcacggagtacgacccccacacgcacgtgtactacaccaccgctgagccgcgctccgagatctctgtgcagcccgtcaccgtgacacaggacaccctcagctgccagagcccagagagcaccagctccacaagggacctgctctcccagttctccgactccagcctccactgcctcgagcccccctgtacgaagtggacactctcatcttttgctgagaagcactatgctcctttcctcttgaaaccaaaagccaaggtagtggtgatcttcctttttctgggcttgctgggggtcagcctttatggcaccacccgagtgagagacgggctggaccttacggacattgtacctcgggaaaccagagaatatgactttattgctgcacaattcaaatacttttctttctacaacatgtatatagtcacccagaaagcagactacccgaatatccagcacttactttacgacctacacaggagtttcagtaacgtgaagtatgtcatgttggaagaaaacaaacagcttcccaaaatgtggctgcactacttcagagactggcttcagggacttcaggatgcatttgacagtgactgggaaaccgggaaaatcatgccaaacaattacaagaatggatcagacgatggagtccttgcctacaaactcctggtgcaaaccggcagccgcgataagcccatcgacatcagccagttgactaaacagcgtctggtggatgcagatggcatcattaatcccagcgctttctacatctacctgacggcttgggtcagcaacgaccccgtcgcgtatgctgcctcccaggccaacatccggccacaccgaccagaatgggtccacgacaaagccgactacatgcctgaaacaaggctgagaatcccggcagcagagcccatcgagtatgcccagttccctttctacctcaacggcttgcgggacacctcagactttgtggaggcaattgaaaaagtaaggaccatctgcagcaactatacgagcctggggctgtccagttaccccaacggctaccccttcctcttctgggagcagtacatcggcctccgccactggctgctgctgttcatcagcgtggtgttggcctgcacattcctcgtgtgcgctgtcttccttctgaacccctggacggccgggatcattgtgatggtcctggcgctgatgacggtcgagctgttcggcatgatgggcctcatcggaatcaagctcagtgccgtgcccgtggtcatcctgatcgcttctgttggcataggagtggagttcaccgttcacgttgctttggcctttctgacggccatcggcgacaagaaccgcagggctgtgcttgccctggagcacatgtttgcacccgtcctggatggcgccgtgtccactctgctgggagtgctgatgctggcgggatctgagttcgacttcattgtcaggtatttctttgctgtgctggcgatcctcaccatcctcggcgttctcaatgggctggttttgcttcccgtgcttttgtctttctttggaccatatcctgaggtgtctccagccaacggcttgaaccgcctgcccacaccctcccctgagccaccccccagcgtggtccgcttcgccatgccgcccggccacacgcacagcgggtctgattcctccgactcggagtatagttcccagacgacagtgtcaggcctcagcgaggagcttcggcactacgaggcccagcagggcgcgggaggccctgcccaccaagtgatcgtggaagccacagaaaaccccgtcttcgcccactccactgtggtccatcccgaatccaggcatcacccaccctcgaacccgagacagcagccccacctggactcagggtccctgcctcccggacggcaaggccagcagccccgcagggacccccccagagaaggcttgtggccacccccctacagaccgcgcagagacgcttttgaaatttctactgaagggcattctggccctagcaatagggcccgctggggccctcgcggggcccgttctcacaaccctcggaacccagcgtccactgccatgggcagctccgtgcccggctactgccagcccatcaccactgtgacggcttctgcctccgtgactgtcgccgtgcacccgccgcctgtccctgggcctgggcggaacccccgagggggactctgcccaggctaccctgagactgaccacggcctgtttgaggacccccacgtgcctttccacgtccggtgtgagaggagggattcgaaggtggaagtcattgagctgcaggacgtggaatgcgaggagaggccccggggaagcagctccaactgagggtgattaaaatctgaagcaaagaggccaaagattggaaaccccccacccccacctctttccagaactgcttgaagagaactggttggagttatggaaaagatgccctgtgccaggacagcagttcattgttactgtaaccgattgtattattttgttaaatatttctataaatatttaagagatgtacacatgtgtaatataggaaggaaggatgtaaagtggtatgatctggggcttctccactcctgccccagagtgtggaggccacagtggggcctctccgtatttgtgcattgggctccgtgccacaaccaagcttcattagtcttaaatttcagcatatgttgctgctgcttaaatattgtataatttacttgtataattctatgcaaatattgcttatgtaataggattattttgtaaaggtttctgtttaaaatattttaaatttgcatatcacaaccctgtggtagtatgaaatgttactgttaactttcaaacacgctatgcgtgataatttttttgtttaatgagcagatatgaagaaagcacgttaatcctggtggcttctctaggtgtcgttgtgtgcggtcctcttgtttggctgtgcgtgtgaacacgtgtgtgagttcaccatgtactgtactgtgattttttttttgtcttgttttgtttctctacactgtctgtaacctgtagtaggctctgacctagtcaggctggaagcgtcaggatatcttttcttcgtgctggtgagggctggccctaaacatccacctaatcctttcaaatcagcccggcaaaagctagactctcctcgtgtctacggcatctcttatgatcattggctgccatccaggaccccaatttgtgcttcagggggataatctccttctctcggatcattgtgatggatgctggaacctcagggtatggagctcacatcagttcatcatggtgggtgttagagaattcggtgacatgcctagtgctgagccttggctgggccatgagagtctgtatactctaaaaagcatgcagcatggtgcccctcttctgaccaacacacacacgacccctcccccaacacccccaaattcaagagtggatgtggccctgtcacaggtagaaaaacctatttagttaattctttcttggcccacagtctcccagaaatgatgttttgagtccctatagtttaaactccctctcttaaatggagcagctggttgaggctttctagatctgtttgcatcttctttaaaactaagtggtgagcatgcattgtggtgtagaggcaggcattatgtaggataagagctccggggggattcttcatgcaccagtgtttagggtacgtgcttcctaagtaaatccaaacattgtctccatcctccccgtcattagtgctctttcaatgtgatgtgggaaagcaggaggatggacacaccccactgaaagatgtaggcaggggcaggtctctcaaccaggcatatttttaaaagttgcttctgtactggttctcttcttttgctctgaggtgtgggctccctcatctcgtaaccagagaccagcacatgtcagggaagcacccagtgtcggctccccatccaaatccacaccagcaccttgttacagacaagaagtcagaggaaagggcggggtccctgcagggctgaagcctaagctactgtgaggcgctcacgagtggcagctcctgttactcccttttaaattacctgggaaatcttaacagaaaggtaatgggcccccagaaatacccacagcatagtgacctcagaccctgatactcaccacaaaacttttaagatgctgattgggagccgcttgtggctgctgggtgtgtgtgtgtgtgtgtgcgtgcgtgcgtgtgtgtgtgtctctgctggggaccctggccacccccctgctgctgtcttggtgcctgtcacccacatggtctgccatcctaacacccagctctgctcagaaaacgtcctgcgtggaggagggatgatgcagaattctgaagtcgacttccctctggctcctggcgtgccctcgctcccttcctgagcccagctcgtgttgcgccggaggctgcgcggcccctgatttctgcatggtgtagaactttctccaatagtcacattggcaaagggagaactggggtgggcggggggtggggctggcagggaattagaatttctctctctcttttaatagttttattttgtctgtcctgtttgttcatttggatgttttaatttttaaaaaaaaaaaaactttgctgatatttataattttgtatcataagaatgttttcctctacagtatttgtcatgccagtttataacaaaaaaaaatgcagggattttatttctattggaaacattacagctatgttttacttttggacagaatttttatttgtatagagtgcttactaatgttaaatagttcagagtatataacatttacattaaggactcatggtaggttttagggtaaggagtttaaaggaaataaatattcaaactgggtctcattgccaattttggtggaaatgagtttgtgtcatttcaattacaaagataaaagtatgccatataatttatttatatgaagatttatttttgtagtgtacatagtagtcatcaagtcttttgacagaagtatatttttaaagaatttatatgtgatgaatccataatgtctggaactttgctgagacatgagtgggcacagttttcattgtaaattacagcaaggaaagaaaatgtttaacagtgttaagagagtcagagcagagtggatattcatgcgattatgaagtgtttattagttaccattggcgacctagcatgcttctcatttcaaaccttggaaggtgaaaatgtacaaactctctaaataattaatgttcaaacactgatagaaattctaacatgaataaaaaataatataacttgttggttatatctttgtttgtagaatgctttttttctttaaaatacttgggagagacagttagtgttggagccatcagaaactgttgtttcatcttgctgaccttgtgacactcttcttttttgctctatctgatggagagagttttaggttttcctcctttttgttttgtataaatagtgggtataagcatagctctgttacatggatgtattacaaagtgggggctgagcttttagtgtgatcatcacccaaatagtgtacattgtacccattaattaatttcttatcacctgaccctatttttgttttctcataccaagaaacttcctaagttaaccatcaaaattagtccttctgtcatctctcttagcatacttatttcccttatgtgatgcctaataatgagggaacataaataaagccaaattcaaagataaaaaaaaaaaaaa

SEQ ID NO: 588 - DNA, 7831 bp, Homo sapiens
aattcagctcacacagcctctccccacgctatggaaatgcgtcgggagtgaactccggcggccgcgctcaccacgtggatccccacttactaccattctcggcgggggtccagttgggggaacccgcaatatgttgttccaaagagcgctcgcccctagcgcccgtccccgagggtgatggacagagcaggactggtttgctggctcctgaaccttgggctccatcgctgggattacgcagcccctcccttctcagctctggggggaaggctactggccggaaagcgccgctgtggctgagagcgaagtttcagagactcttatttaaactgggttgttacattcaaaaaaactgcggcaagttcttggttgtgggcctcctcatatttggggccttcgcggtgggattaaaagcagcgaacctcgagaccaacgtggaggagctgtgggtggaagttggaggacgagtaagtcgtgaattaaattatactcgccagaagattggagaagaggctatgtttaatcctcaactcatgatacagacccctaaagaagaaggtgctaatgtcctgaccacagaagcgctcctacaacacctggactcggcactccaggccagccgtgtccatgtatacatgtacaacaggcagtggaaattggaacatttgtgttacaaatcaggagagcttatcacagaaacaggttacatggatcagataatagaatatctttacccttgtttgattattacacctttggactgcttctgggaaggggcgaaattacagtctgggacagcatacctcctaggtaaacctcctttgcggtggacaaacttcgaccctttggaattcctggaagagttaaagaaaataaactatcaagtggacagctgggaggaaatgctgaataaggctgaggttggtcatggttacatggaccgcccctgcctcaatccggccgatccagactgccccgccacagcccccaacaaaaattcaaccaaacctcttgatatggcccttgttttgaatggtggatgtcatggcttatccagaaagtatatgcactggcaggaggagttgattgtgggtggcacagtcaagaacagcactggaaaactcgtcagcgcccatgccctgcagaccatgttccagttaatgactcccaagcaaatgtacgagcacttcaaggggtacgagtatgtctcacacatcaactggaacgaggacaaagcggcagccatcctggaggcctggcagaggacatatgtggaggtggttcatcagagtgtcgcacagaactccactcaaaaggtgctttccttcaccaccacgaccctggacgacatcctgaaatccttctctgacgtcagtgtcatccgcgtggccagcggctacttactcatgctcgcctatgcctgtctaaccatgctgcgctgggactgctccaagtcccagggtgccgtggggctggctggcgtcctgctggttgcactgtcagtggctgcaggactgggcctgtgctcattgatcggaatttcctttaacgctgcaacaactcaggttttgccatttctcgctcttggtgttggtgtggatgatgtttttcttctggcccacgccttcagtgaaacaggacagaataaaagaatcccttttgaggacaggaccggggagtgcctgaagcgcacaggagccagcgtggccctcacgtccatcagcaatgtcacagccttcttcatggccgcgttaatcccaattcccgctctgcgggcgttctccctccaggcagcggtagtagtggtgttcaattttgccatggttctgctcatttttcctgcaattctcagcatggatttatatcgacgcgaggacaggagactggatattttctgctgttttacaagcccctgcgtcagcagagtgattcaggttgaacctcaggcctacaccgacacacacgacaatacccgctacagccccccacctccctacagcagccacagctttgcccatgaaacgcagattaccatgcagtccactgtccagctccgcacggagtacgacccccacacgcacgtgtactacaccaccgctgagccgcgctccgagatctctgtgcagcccgtcaccgtgacacaggacaccctcagctgccagagcccagagagcaccagctccacaagggacctgctctcccagttctccgactccagcctccactgcctcgagcccccctgtacgaagtggacactctcatcttttgctgagaagcactatgctcctttcctcttgaaaccaaaagccaaggtagtggtgatcttcctttttctgggcttgctgggggtcagcctttatggcaccacccgagtgagagacgggctggaccttacggacattgtacctcgggaaaccagagaatatgactttattgctgcacaattcaaatacttttctttctacaacatgtatatagtcacccagaaagcagactacccgaatatccagcacttactttacgacctacacaggagtttcagtaacgtgaagtatgtcatgttggaagaaaacaaacagcttcccaaaatgtggctgcactacttcagagactggcttcagggacttcaggatgcatttgacagtgactgggaaaccgggaaaatcatgccaaacaattacaagaatggatcagacgatggagtccttgcctacaaactcctggtgcaaaccggcagccgcgataagcccatcgacatcagccagttgactaaacagcgtctggtggatgcagatggcatcattaatcccagcgctttctacatctacctgacggcttgggtcagcaacgaccccgtcgcgtatgctgcctcccaggccaacatccggccacaccgaccagaatgggtccacgacaaagccgactacatgcctgaaacaaggctgagaatcccggcagcagagcccatcgagtatgcccagttccctttctacctcaacggcttgcgggacacctcagactttgtggaggcaattgaaaaagtaaggaccatctgcagcaactatacgagcctggggctgtccagttaccccaacggctaccccttcctcttctgggagcagtacatcggcctccgccactggctgctgctgttcatcagcgtggtgttggcctgcacattcctcgtgtgcgctgtcttccttctgaacccctggacggccgggatcattgtgatggtcctggcgctgatgacggtcgagctgttcggcatgatgggcctcatcggaatcaagctcagtgccgtgcccgtggtcatcctgatcgcttctgttggcataggagtggagttcaccgttcacgttgctttggcctttctgacggccatcggcgacaagaaccgcagggctgtgcttgccctggagcacatgtttgcacccgtcctggatggcgccgtgtccactctgctgggagtgctgatgctggcgggatctgagttcgacttcattgtcaggtatttctttgctgtgctggcgatcctcaccatcctcggcgttctcaatgggctggttttgcttcccgtgcttttgtctttctttggaccatatcctgaggtgtctccagccaacggcttgaaccgcctgcccacaccctcccctgagccaccccccagcgtggtccgcttcgccatgccgcccggccacacgcacagcgggtctgattcctccgactcggagtatagttcccagacgacagtgtcaggcctcagcgaggagcttcggcactacgaggcccagcagggcgcgggaggccctgcccaccaagtgatcgtggaagccacagaaaaccccgtcttcgcccactccactgtggtccatcccgaatccaggcatcacccaccctcgaacccgagacagcagccccacctggactcagggtccctgcctcccggacggcaaggccagcagccccgcagggacccccccagagaaggcttgtggccacccccctacagaccgcgcagagacgcttttgaaatttctactgaagggcattctggccctagcaatagggcccgctggggccctcgcggggcccgttctcacaaccctcggaacccagcgtccactgccatgggcagctccgtgcccggctactgccagcccatcaccactgtgacggcttctgcctccgtgactgtcgccgtgcacccgccgcctgtccctgggcctgggcggaacccccgagggggactctgcccaggctaccctgagactgaccacggcctgtttgaggacccccacgtgcctttccacgtccggtgtgagaggagggattcgaaggtggaagtcattgagctgcaggacgtggaatgcgaggagaggccccggggaagcagctccaactgagggtgattaaaatctgaagcaaagaggccaaagattggaaaccccccacccccacctctttccagaactgcttgaagagaactggttggagttatggaaaagatgccctgtgccaggacagcagttcattgttactgtaaccgattgtattattttgttaaatatttctataaatatttaagagatgtacacatgtgtaatataggaaggaaggatgtaaagtggtatgatctggggcttctccactcctgccccagagtgtggaggccacagtggggcctctccgtatttgtgcattgggctccgtgccacaaccaagcttcattagtcttaaatttcagcatatgttgctgctgcttaaatattgtataatttacttgtataattctatgcaaatattgcttatgtaataggattattttgtaaaggtttctgtttaaaatattttaaatttgcatatcacaaccctgtggtagtatgaaatgttactgttaactttcaaacacgctatgcgtgataatttttttgtttaatgagcagatatgaagaaagcacgttaatcctggtggcttctctaggtgtcgttgtgtgcggtcctcttgtttggctgtgcgtgtgaacacgtgtgtgagttcaccatgtactgtactgtgattttttttttgtcttgttttgtttctctacactgtctgtaacctgtagtaggctctgacctagtcaggctggaagcgtcaggatatcttttcttcgtgctggtgagggctggccctaaacatccacctaatcctttcaaatcagcccggcaaaagctagactctcctcgtgtctacggcatctcttatgatcattggctgccatccaggaccccaatttgtgcttcagggggataatctccttctctcggatcattgtgatggatgctggaacctcagggtatggagctcacatcagttcatcatggtgggtgttagagaattcggtgacatgcctagtgctgagccttggctgggccatgagagtctgtatactctaaaaagcatgcagcatggtgcccctcttctgaccaacacacacacgacccctcccccaacacccccaaattcaagagtggatgtggccctgtcacaggtagaaaaacctatttagttaattctttcttggcccacagtctcccagaaatgatgttttgagtccctatagtttaaactccctctcttaaatggagcagctggttgaggctttctagatctgtttgcatcttctttaaaactaagtggtgagcatgcattgtggtgtagaggcaggcattatgtaggataagagctccggggggattcttcatgcaccagtgtttagggtacgtgcttcctaagtaaatccaaacattgtctccatcctccccgtcattagtgctctttcaatgtgatgtgggaaagcaggaggatggacacaccccactgaaagatgtaggcaggggcaggtctctcaaccaggcatatttttaaaagttgcttctgtactggttctcttcttttgctctgaggtgtgggctccctcatctcgtaaccagagaccagcacatgtcagggaagcacccagtgtcggctccccatccaaatccacaccagcaccttgttacagacaagaagtcagaggaaagggcggggtccctgcagggctgaagcctaagctactgtgaggcgctcacgagtggcagctcctgttactcccttttaaattacctgggaaatcttaacagaaaggtaatgggcccccagaaatacccacagcatagtgacctcagaccctgatactcaccacaaaacttttaagatgctgattgggagccgcttgtggctgctgggtgtgtgtgtgtgtgtgtgcgtgcgtgcgtgtgtgtgtgtctctgctggggaccctggccacccccctgctgctgtcttggtgcctgtcacccacatggtctgccatcctaacacccagctctgctcagaaaacgtcctgcgtggaggagggatgatgcagaattctgaagtcgacttccctctggctcctggcgtgccctcgctcccttcctgagcccagctcgtgttgcgccggaggctgcgcggcccctgatttctgcatggtgtagaactttctccaatagtcacattggcaaagggagaactggggtgggcggggggtggggctggcagggaattagaatttctctctctcttttaatagttttattttgtctgtcctgtttgttcatttggatgttttaatttttaaaaaaaaaaaaactttgctgatatttataattttgtatcataagaatgttttcctctacagtatttgtcatgccagtttataacaaaaaaaaatgcagggattttatttctattggaaacattacagctatgttttacttttggacagaatttttatttgtatagagtgcttactaatgttaaatagttcagagtatataacatttacattaaggactcatggtaggttttagggtaaggagtttaaaggaaataaatattcaaactgggtctcattgccaattttggtggaaatgagtttgtgtcatttcaattacaaagataaaagtatgccatataatttatttatatgaagatttatttttgtagtgtacatagtagtcatcaagtcttttgacagaagtatatttttaaagaatttatatgtgatgaatccataatgtctggaactttgctgagacatgagtgggcacagttttcattgtaaattacagcaaggaaagaaaatgtttaacagtgttaagagagtcagagcagagtggatattcatgcgattatgaagtgtttattagttaccattggcgacctagcatgcttctcatttcaaaccttggaaggtgaaaatgtacaaactctctaaataattaatgttcaaacactgatagaaattctaacatgaataaaaaataatataacttgttggttatatctttgtttgtagaatgctttttttctttaaaatacttgggagagacagttagtgttggagccatcagaaactgttgtttcatcttgctgaccttgtgacactcttcttttttgctctatctgatggagagagttttaggttttcctcctttttgttttgtataaatagtgggtataagcatagctctgttacatggatgtattacaaagtgggggctgagcttttagtgtgatcatcacccaaatagtgtacattgtacccattaattaatttcttatcacctgaccctatttttgttttctcataccaagaaacttcctaagttaaccatcaaaattagtccttctgtcatctctcttagcatacttatttcccttatgtgatgcctaataatgagggaacataaataaagccaaattcaaagataaaaaaaaaaaaaa

SEQ ID NO: 589 - DNA, 5572 bp, Homo sapiens
cctcccctcgcccggcgcggtcccgtccgcctctcgctcgcctcccgcctcccctcggtcttccgaggcgcccgggctcccggcgcggcggcggagggggcgggcaggccggcgggcggtgatgtggcgggactctttatgcgctgcggcaggatacgcgctcggcgctgggacgcgactgcgctcagttctctcctctcggaagctgcagccatgatggaagtttgagagttgagccgctgtgaggcgaggccgggctcaggcgagggagatgagagacggcggcggccgcggcccggagcccctctcagcgcctgtgagcagccgcgggggcagcgccctcggggagccggccggcctgcggcggcggcagcggcggcgtttctcgcctcctcttcgtcttttctaaccgtgcagcctcttcctcggcttctcctgaaagggaaggtggaagccgtgggctcgggcgggagccggctgaggcgcggcggcggcggcggcacctcccgctcctggagcgggggggagaagcggcggcggcggcggccgcggcggctgcagctccagggagggggtctgagtcgcctgtcaccatttccagggctgggaacgccggagagttggtctctccccttctactgcctccaacacggcggcggcggcggcggcacatccagggacccgggccggttttaaacctcccgtccgccgccgccgcaccccccgtggcccgggctccggaggccgccggcggaggcagccgttcggaggattattcgtcttctccccattccgctgccgccgctgccaggcctctggctgctgaggagaagcaggcccagtcgctgcaaccatccagcagccgccgcagcagccattacccggctgcggtccagagccaagcggcggcagagcgaggggcatcagctaccgccaagtccagagccatttccatcctgcagaagaagccccgccaccagcagcttctgccatctctctcctcctttttcttcagccacaggctcccagacatgacagccatcatcaaagagatcgttagcagaaacaaaaggagatatcaagaggatggattcgacttagacttgacctatatttatccaaacattattgctatgggatttcctgcagaaagacttgaaggcgtatacaggaacaatattgatgatgtagtaaggtttttggattcaaagcataaaaaccattacaagatatacaatctttgtgctgaaagacattatgacaccgccaaatttaattgcagagttgcacaatatccttttgaagaccataacccaccacagctagaacttatcaaacccttttgtgaagatcttgaccaatggctaagtgaagatgacaatcatgttgcagcaattcactgtaaagctggaaagggacgaactggtgtaatgatatgtgcatatttattacatcggggcaaatttttaaaggcacaagaggccctagatttctatggggaagtaaggaccagagacaaaaagggagtaactattcccagtcagaggcgctatgtgtattattatagctacctgttaaagaatcatctggattatagaccagtggcactgttgtttcacaagatgatgtttgaaactattccaatgttcagtggcggaacttgcaatcctcagtttgtggtctgccagctaaaggtgaagatatattcctccaattcaggacccacacgacgggaagacaagttcatgtactttgagttccctcagccgttacctgtgtgtggtgatatcaaagtagagttcttccacaaacagaacaagatgctaaaaaaggacaaaatgtttcacttttgggtaaatacattcttcataccaggaccagaggaaacctcagaaaaagtagaaaatggaagtctatgtgatcaagaaatcgatagcatttgcagtatagagcgtgcagataatgacaaggaatatctagtacttactttaacaaaaaatgatcttgacaaagcaaataaagacaaagccaaccgatacttttctccaaattttaaggtgaagctgtacttcacaaaaacagtagaggagccgtcaaatccagaggctagcagttcaacttctgtaacaccagatgttagtgacaatgaacctgatcattatagatattctgacaccactgactctgatccagagaatgaaccttttgatgaagatcagcatacacaaattacaaaagtctgaatttttttttatcaagagggataaaacaccatgaaaataaacttgaataaactgaaaatggacctttttttttttaatggcaataggacattgtgtcagattaccagttataggaacaattctcttttcctgaccaatcttgttttaccctatacatccacagggttttgacacttgttgtccagttgaaaaaaggttgtgtagctgtgtcatgtatatacctttttgtgtcaaaaggacatttaaaattcaattaggattaataaagatggcactttcccgttttattccagttttataaaaagtggagacagactgatgtgtatacgtaggaattttttccttttgtgttctgtcaccaactgaagtggctaaagagctttgtgatatactggttcacatcctacccctttgcacttgtggcaacagataagtttgcagttggctaagagaggtttccgaagggttttgctacattctaatgcatgtattcgggttaggggaatggagggaatgctcagaaaggaaataattttatgctggactctggaccatataccatctccagctatttacacacacctttctttagcatgctacagttattaatctggacattcgaggaattggccgctgtcactgcttgttgtttgcgcatttttttttaaagcatattggtgctagaaaaggcagctaaaggaagtgaatctgtattggggtacaggaatgaaccttctgcaacatcttaagatccacaaatgaagggatataaaaataatgtcataggtaagaaacacagcaacaatgacttaaccatataaatgtggaggctatcaacaaagaatgggcttgaaacattataaaaattgacaatgatttattaaatatgttttctcaattgtaacgacttctccatctcctgtgtaatcaaggccagtgctaaaattcagatgctgttagtacctacatcagtcaacaacttacacttattttactagttttcaatcataatacctgctgtggatgcttcatgtgctgcctgcaagcttcttttttctcattaaatataaaatattttgtaatgctgcacagaaattttcaatttgagattctacagtaagcgttttttttctttgaagatttatgatgcacttattcaatagctgtcagccgttccacccttttgaccttacacattctattacaatgaattttgcagttttgcacattttttaaatgtcattaactgttagggaattttacttgaatactgaatacatataatgtttatattaaaaaggacatttgtgttaaaaaggaaattagagttgcagtaaactttcaatgctgcacacaaaaaaaagacatttgatttttcagtagaaattgtcctacatgtgctttattgatttgctattgaaagaatagggtttttttttttttttttttttttttttttaaatgtgcagtgttgaatcatttcttcatagtgctcccccgagttgggactagggcttcaatttcacttcttaaaaaaaatcatcatatatttgatatgcccagactgcatacgattttaagcggagtacaactactattgtaaagctaatgtgaagatattattaaaaaggtttttttttccagaaatttggtgtcttcaaattataccttcaccttgacatttgaatatccagccattttgtttcttaatggtataaaattccattttcaataacttattggtgctgaaattgttcactagctgtggtctgacctagttaatttacaaatacagattgaataggacctactagagcagcatttatagagtttgatggcaaatagattaggcagaacttcatctaaaatattcttagtaaataatgttgacacgttttccataccttgtcagtttcattcaacaatttttaaatttttaacaaagctcttaggatttacacatttatatttaaacattgatatatagagtattgattgattgctcataagttaaattggtaaagttagagacaactattctaacacctcaccattgaaatttatatgccaccttgtctttcataaaagctgaaaattgttacctaaaatgaaaatcaacttcatgttttgaagatagttataaatattgttctttgttacaatttcgggcaccgcatattaaaacgtaactttattgttccaatatgtaacatggagggccaggtcataaataatgacattataatgggcttttgcactgttattatttttcctttggaatgtgaaggtctgaatgagggttttgattttgaatgtttcaatgtttttgagaagccttgcttacattttatggtgtagtcattggaaatggaaaaatggcattatatatattatatatataaatatatattatacatactctccttactttatttcagttaccatccccatagaatttgacaagaattgctatgactgaaaggttttcgagtcctaattaaaactttatttatggcagtattcataattagcctgaaatgcattctgtaggtaatctctgagtttctggaatattttcttagactttttggatgtgcagcagcttacatgtctgaagttacttgaaggcatcacttttaagaaagcttacagttgggccctgtaccatcccaagtcctttgtagctcctcttgaacatgtttgccatacttttaaaagggtagttgaataaatagcatcaccattctttgctgtggcacaggttataaacttaagtggagtttaccggcagcatcaaatgtttcagctttaaaaaataaaagtagggtacaagtttaatgtttagttctagaaattttgtgcaatatgttcataacgatggctgtggttgccacaaagtgcctcgtttacctttaaatactgttaatgtgtcatgcatgcagatggaaggggtggaactgtgcactaaagtgggggctttaactgtagtatttggcagagttgccttctacctgccagttcaaaagttcaacctgttttcatatagaatatatatactaaaaaatttcagtctgttaaacagccttactctgattcagcctcttcagatactcttgtgctgtgcagcagtggctctgtgtgtaaatgctatgcactgaggatacacaaaaataccaatatgatgtgtacaggataatgcctcatcccaatcagatgtccatttgttattgtgtttgttaacaaccctttatctcttagtgttataaactccacttaaaactgattaaagtctcattcttgtcaaaaaaaaaaaaaaaaaaaaaaaaaaa

SEQ ID NO: 590 - DNA, 1500 bp, Homo sapiens
acgtgcacggtccggccggggcgcgcggagcctggccccgggcgatccatcctgccgggttttcacggcggccaagggggggcggggctaggtggtctctgagaaccgagcttgactccgacgccgcgaaccgacctggagcccgaggggaaagatgctcgactctcttgggggcaccggagcgggcgcaggagaggcctgcggggtgcgtcccactcacagggatcctctttcagttcatttagataggtgccctttgggcccttgaaattcaacggctatgtgttcacgttcagcacgctcggctgagagctttcatttttagggcaaacgagccgagttaccggggaagcgagaggtggggcgctgcaagggagccggatgaggtgatacacgctggcgacacaatagcaggttgctctttgtgctaagactgacaccatgaggacacagatttgggggaagggggaatctctaggcaaaggctgttacagtcaaatctctgcgaacgattgtgatccgacagcggtgcaaaaggaaagagcgaatgcagtccacgccgcggaaatctaggggtagaggcaaggggggagggtattccccttgcagggaccgtccctgcatttccctctacactgagcagcgtggtcacctggtccttttcacctgtgcacaggtaacctcagactcgagtcagtgacactgctcaacgcacccatctcagctttcatcatcagtcctccacccccgccccacaacagcctaccctgcctccggctgggtttctgggcagaggccgaggcttagctcgttatcctcgcctcgcgttgctgcaaaagccgcagcaagtgcagctgcaggctggcggctgggaaccggcccgagcaagccccaggcagctacactgggcatgctcagtagagcctgcggcttggggactctgcgctcgcacccagagctaccgctctgccccctcctaccgccccctgccctgccctgccctcccctcgcccggcgcggtcccgtccgcctctcgctcgcctcccgcctcccctcggtcttccgaggcgcccgggctcccggcgcggcggcggagggggcgggcaggccggcgggcggtgatgtggcgggactctttatgcgctgcggcaggatacgcgctcggcgctgggacgcgactgcgctcagttctctcctctcggaagctgcagccatgatggaagtttgagagttgagccgctgtgaggcgaggccgggctcaggcgagggagatgagagacggcggcggccgcggcccggagcccctctcagcgcctgtgagcagccgcgggggcagcgccctcggggagccggccggcctgcggcggcggcagcggcggcgtttctcgcctcctcttcgtcttttctaaccgtgcagcctcttcctcggcttctcctgaaagggaaggtggaagccgtgggctcgggcgggagccggctgaggcgcggcggcggcggcgg

SEQ ID NO: 591 - DNA, 2111 bp, Homo sapiens
ctctgcgaacgattgtgatccgacagcggtgcaaaaggaaagagcgaatgcagtccacgccgcggaaatctaggggtagaggcaaggggggagggtattccccttgcagggaccgtccctgcatttccctctacactgagcagcgtggtcacctggtccttttcacctgtgcacaggtaacctcagactcgagtcagtgacactgctcaacgcacccatctcagctttcatcatcagtcctccacccccgccccacaacagcctaccctgcctccggctgggtttctgggcagaggccgaggcttagctcgttatcctcgcctcgcgttgctgcaaaagccgcagcaagtgcagctgcaggctggcggctgggaaccggcccgagcaagccccaggcagctacactgggcatgctcagtagagcctgcggcttggggactctgcgctcgcacccagagctaccgctctgccccctcctaccgccccctgccctgccctgccctcccctcgcccggcgcggtcccgtccgcctctcgctcgcctcccgcctcccctcggtcttccgaggcgcccgggctcccggcgcggcggcggagggggcgggcaggccggcgggcggtgatgtggcgggactctttatgcgctgcggcaggatacgcgctcggcgctgggacgcgactgcgctcagttctctcctctcggaagctgcagccatgatggaagtttgagagttgagccgctgtgaggcgaggccgggctcaggcgagggagatgagagacggcggcggccgcggcccggagcccctctcagcgcctgtgagcagccgcgggggcagcgccctcggggagccggccggcctgcggcggcggcagcggcggcgtttctcgcctcctcttcgtcttttctaaccgtgcagcctcttcctcggcttctcctgaaagggaaggtggaagccgtgggctcgggcgggagccggctgaggcgcggcggcggcggcggcacctcccgctcctggagcgggggggagaagcggcggcggcggcggccgcggcggctgcagctccagggagggggtctgagtcgcctgtcaccatttccagggctgggaacgccggagagttggtctctccccttctactgcctccaacacggcggcggcggcggctggcacatccagggacccgggccggttttaaacctcccgtgcgccgccgccgcaccccccgtggcccgggctccggaggccgccggcggaggcagccgttcggaggattattcgtcttctccccattccgctgccgccgctgccaggcctctggctgctgaggagaagcaggcccagtcgctgcaaccatccagcagccgccgcagcagccattacccggctgcggtccagagccaagcggcggcagagcgaggggcatcagctaccgccaagtccagagccatttccatcctgcagaagaagccccgccaccagcagcttctgccatctctctcctcctttttcttcagccacaggctcccagacatgacagccatcatcaaagagatcgttagcagaaacaaaaggagatatcaagaggatggattcgacttagacttgacctgtatccatttctgcggctgctcctctttacctttctgtcactctcttagaacgtgggagtagacggatgcgaaaatgtccgtagtttgggtgactataacatttaaccctggtcaggttgctaggtcatatattttgtgtttcctttctgtgtattcaacctagggtgtgtttggctagacggaactcttgcctggttgcaagtgtcaagccaccgattgctttcttaggctatctatatggtctcttcctgagggctattgtccgttaatacagaatacagtacactgttagtggattagcgagctcggtaatccggtctcctaaatgaacaaaaaagtagacgctttttgaggttgagcatatttcgattaaatcttggcttaggccctagatcaagggtttagatcagaataaaatgaaaattagtgttgcacgtacgcatattgcatcagaatcttgcagtgattgttttagtttcctgagttgcattgatagatt

SEQ ID NO: 592 - DNA, 1085 bp, Homo sapiens
gtctaattatcatgtagaataggaaattgcggtctagaaaggttaagtgacttgtccaaattacacaactagttagagacatagccagctcttaaatctgacttccagattttcactgtgtcttcttttttctgtaacgtgttgccttttttagccatgaaaaattagaagttgaactcttgtcttttcaggcaggtgtcaattttggggttttgttttgatttttggtttttgacataaagtactttagttctgtgatgtataaaccgtgagtttctgtttttctcatatacctgaatactgtccatgtggaagttaccttttatctttaccagtattaacacataaatggttatacataaatacattgaccaccttttattactccagctatagtggggaaaactttcttttcataactagctaatgttttaaaaagtattcttttagtttgattgctgcatatttcagatatttctttccttaactaaagtactcagatatttatccaaacattattgctatgggatttcctgcagaaagacttgaaggcgtatacaggaacaatattgatgatgtagtaaggtaagaatgctttgattttctatttcaaatattgatgtttatattcatgttgtgttttcatttagaaaagatttctaagccacagaaaaagatactttgtgatgtaaactattattgtagtgctctataatcattttttggcttaccgtacctaatggacttcagggggatacagttcatttgataagaactgaccttatacattacataatcaggtacttatgtgatatcatttcctggactccataaaatgctggtcaccaggtttaatacctggattccattacagtgtgatttttgtcttatttcatagttggggattaggcttaaaatcctagagtggatttattcagttaaatttattcacactaagatgtagatgactaatactgtatatttttatgtagaccaaattttaaggtaccactgtgcatatgtataccaactacctgaagaagtatttggttggtacaagagatatagaaaggaatcgctgggtg

SEQ ID NO: 593 - DNA, 1045 bp, Homo sapiens
tgtttaatacctttgtacagaattaatagttagtacgtggatctttcaaatatcaaaagttttcagtttgatgggaaaatgatgtctgaattttcagggttatttttaagagtacttgattatgactgtcttgtaaatctctatgagctaggtatacttgcactaaatgctaatgctttttaaagaagttatgtcttaatattcagtctcattatgttaggttgaagatagaagattatgaaaatattctctgaaaagctctggttttacttcagattgtataaatctgtgtaatgtaataattatttaagaatgacatgattactactctaaacccatagaaggggtatttgttggattatttattttcacttaaatggtatttgagattaggaaaaagaaaatctgtcttttggtttttcttgatagtattaatgtaatttcaaatgttagctcatttttgttaatggtggctttttgtttgtttgttttgttttaaggtttttggattcaaagcataaaaaccattacaagatatacaatctgtaagtatgttttcttatttgtatgcttgcaaatatcttctaaaacaactattaagtgaaagttatctgcttgttagagtgaggtagagttaaagatacattttaacagaattgtattcctaaaccgattaagtcaagaagtccaagagcattgttagatcatttagaaagtgtagtgatgaggtaaaacattgttggcacagattcatgttacttgatctgctttaaatgacttggcatctagcccatatttgagcccataaccgtgtggtaatttgaagtgtaattcacagtagagcttctgttaaagcactaatagcatcttccatggaggtatacttcagagtgaatataattttgtttatcctgtgtctctagagctattgactgaaaaagctgttagggcattctctaactgtacatcacctaagttatttaaaattgctgaattaggtggcttgtcttgtctaggacagagttttaaggactgcccacctgat

SEQ ID NO: 594 - DNA, 1044 bp, Homo sapiens
aacaacattcagtttttctttactgtccttatgcttttactatttttaacatatatctttttgaagaatagtttgagaattatgtatgcttaactatgagatacagatactattgaaactagtcagttgtttataggtacttgtaaaattaaaaatatattccaatagcatgcagatttttcatagaggaaatttgaaagcatggaagcacctgaatttacagtactctgtattagtggcatcacaagtttttaagcaaatgtattagctctaattgcatacacttaatcttttaagctttggttttattattataatatgggggtgataacagtatctacttaatagaattcttgttattacatgaaataattaatgttaaacacagcataatatgtgtcacattataaagattcaggcaatgtttgttagtattagtacttttttttcttcctaagtgcaaaagataactttatatcacttttaaacttttcttttagttgtgctgaaagacattatgacaccgccaaatttaattgcagaggtaggtatgaatgtactgtactatgttgtataacttaaacccgatagactgtatcttactgtcataacaataatgagtcatccagattatcgagtgagatacatatttaagaattatctttaaaaatttcaaaaattttaattttactgttgtgttttaggaaaaagtattgcataaagctattaatattgtcaggaagactaaagtgcagcatagactaagaattaggaaaattcctagactaaaaatagtataaggagagggtttacctactatttgaggcagttggtctaatagtaagcaatcacagggagaaagcagaactacttaactcttctgtgttgaggaatgacataaaaggtaggaaaggatataacaaatgttgataagaggagtctgatggatgagaggagggaactgctttaaatgagtttctacttcagacataagttaattctcagagcccacaaaaactttcacttttatttgtgaaatacaac

SEQ ID NO: 595 - DNA, 1239 bp, Homo sapiens
cctttaaataacacacttagcatttttattttatgaaatgtaatatgtagttctttgcatagtttatcctattagtaatctattctgtctttggaatatgttttgtgatgatgaaataaatactataaatagtattattccttttgcattgagagtcctgacgaaatgtccatgtgacagttcattttgggtttagctctacctctaatatgtgacctatgctaccagtccgtatagcgtaaattcccagaatatatcctcctgaataaaatgggggaaaataatacctggcttccttaatgattatatttaagacttatcaagagactattttctatttaacaattagaaagttaagcaatacattatttttctctggaatccagtgtttcttttaaatacctgttaagtttgtatgcaacatttctaaagttacctacttgttaattaaaaattcaagagtttttttttcttattctgaggttatctttttaccacagttgcacaatatccttttgaagaccataacccaccacagctagaacttatcaaacccttttgtgaagatcttgaccaatggctaagtgaagatgacaatcatgttgcagcaattcactgtaaagctggaaagggacgaactggtgtaatgatatgtgcatatttattacatcggggcaaatttttaaaggcacaagaggccctagatttctatggggaagtaaggaccagagacaaaaaggtaagttattttttgatgtttttcctttcctcttcctggatctgagaatttattggaaaacagattttgggtttctttttttccttcagttttattgaggtgtaattgacaagtaaaaattatatataaatacaatgtataatatgatgttttgatgtatgtgtatatacattgtgaaatgattactacagtcaaactacttaacatattcatcacctcacataattattattctccccccagggtgaaagcatttaagatctacaagctacaattttcaattatacaatgttattattaactatagtcactatgctgtccagtagagcttcagatcttgttcatcttgtgttcctccctccccaccctcagtccctggaaaacaggttttaaagatagttgctaatccttatttcttctaaatttttaaatcagttgctgcctcaatttctatatgagaaatgactgattgatttcatttttctgttcacgctaccatt

SEQ ID NO: 596 - DNA, 1142 bp, Homo sapiens
ccagcatcactttttgctactgctgtttctgccttaaaggcaatatgcctctgtctagtttgctgattctgatactctttcccctggaaagtaggtaatcaagtttgtgaggagctgtgtgtttaaggagtccataaatccttgtggggagccctaggtgtatagagcatagctgtagggcagaggcctttgacacttattctggatatgcagtggcctttgcctatggggttcatgggtcagagcgctgttgtgacctttgaataaatgggttgttatgataattgttttaagggaggagagttattctgatatcctttgtattgatattgctcttatttattattgagctggatttaagtattaatcatttaaggtcaaatttctaatgtatatatgttcttaaatggctacgacccagttaccatagcaatttagtgaaataactataatggaacattttttttcaatttggcttctcttttttttctgtccaccagggagtaactattcccagtcagaggcgctatgtgtattattatagctacctgttaaagaatcatctggattatagaccagtggcactgttgtttcacaagatgatgtttgaaactattccaatgttcagtggcggaacttgcagtaagtgcttgaaattctcatccttccatgtattggaacagttttcttaaccatatctagaagtttacataaaaatttagaaagaaatttaccacatttgaaatttatgcaggagactatatttctgaagcatttgaacaaattaattagctttgttgttcaactcattgggctaaagaagccaaaagcaatgggttttaatgtagtcgaagccaaattatatttatgaaagaaatattctgtgttataaccaccaaatacagcccaattctgactagatgatggaagaacctgtcccatcagaggtccagcatgaggtccagcagaggtccaccagaggagttcagcaatttgctgctcttagggcagggatcaattccttaatatcttaggaagactaggtattgacagtaatggtgacaaagcaatgaaaaggaaaggaagaagtgataagacgtggcagcaagctgaagtatgatgagtaaagaataggaatcaaa

SEQ ID NO: 597 - DNA, 1167 bp, Homo sapiens
ccgcatgctagagacttaagaatactatagcaaatatctgtcttctttacatttaaaaatttttcgtgactactccctgttgatatctgtcttaaaagttacttttgatgtagttcacaaatgtaccagataattatttcatcgtttttaatgcttaaagtttttatttgtattaggatttttagtatgattttaatgttaaagttttgaagttactctgccactagaagtctaattttgggacttactattcatgaaataggaattgacttttatataagtaataggaccttattttgaaggttcaaactggagaaaatcttacattgtttatatttttatttcatttatttcagttgatttgcttgagatcaagattgcagatacagaatccatatttcgtgtatattgctgatattaatcattaaaatcgtttttgacagtttgacagttaaaggcatttcctgtgaaataatactggtatgtatttaaccatgcagatcctcagtttgtggtctgccagctaaaggtgaagatatattcctccaattcaggacccacacgacgggaagacaagttcatgtactttgagttccctcagccgttacctgtgtgtggtgatatcaaagtagagttcttccacaaacagaacaagatgctaaaaaaggtttgtactttactttcattgggagaaatatccaaaataaggacagattaaaagctatattttattttatgacatgtaaggaactataatttgttttctattagatctgcaggtgttttgcttactctggcattggtgagacattataagggtaaataatcctgtttgaaggaaaaggccttatggcattgtaacatgagaggaatttttcttaacaaggatggttaactgagaagaaattagcatgggaccaatattttaaaaattttggtctataggtagaaatgagatctgttctgtggtcttatgtagtgacacaaaccactttttctccattttggcttatgtttctttttctttccttttttttttttttcctttttgttagagacagggtcttgttctattgcccaggctgagtagctaagactacaagcatgtgccaccacacccagctaattttttttatttttatttttgtagggacagggtctcactat

SEQ ID NO: 598 - DNA, 1225 bp, Homo sapiens
aagtaaacatgtatttgccatgcgtcatcagggaagttgcactcaccgtccaagaacttttgttaaagtaaatcttggaataggtagctcatttgaaatgtagaaaaaattaaatccatatctgaattttgtttatatgtatgtacacgtaaactaaaaacgtatttaaagctagtattagatgagaaaagaggtttttttacttaaaattttaaggcaaaagtagtttatcttagatcttgtgagattgtatttttggtttaaaatttgagaatttgagtgaagaaaaatcatgtgaatgaaaatgcaacagataactcagattgccttataatagtctttgtgtttacctttattcagaatatcaaatgatagtttattttgttgactttttgcaaatgtttaacataggtgacagattttcttttttaaaaaaataaaacatcattaattaaatatgtcatttcatttctttttcttttctttttttttttttttaggacaaaatgtttcacttttgggtaaatacattcttcataccaggaccagaggaaacctcagaaaaagtagaaaatggaagtctatgtgatcaagaaatcgatagcatttgcagtatagagcgtgcagataatgacaaggaatatctagtacttactttaacaaaaaatgatcttgacaaagcaaataaagacaaagccaaccgatacttttctccaaattttaaggtcagttaaattaaacattttgtgggggttgttgacttgtatgtatgtgatgtgtgtttaattctaggagtacagctgatgaagaacttgcttgacaagtttttaacttatgtattatttcgaagcagtgtttacgtagcagtaacatgaaagtttctaataaaatacccaatgtacacagcgtcaaaaaagctgcatttttccttttcctaattcttcgttgtttgctgaaatctggggcaaaggtgcgggagggggctaaatgactgggatatgaagtaggaatgggagaggaaagaaatagatgggaactcagtcatttgggaatgattcatatggaatgtttttactgcttccactcctgtctgccttccaatttattctcaatccctcagagtgatcttaaaaatagacttgattgtgtcacttctgtttacactttataaggaccttgtgtttttttttttaccatgacctacaaggcccagcataatttagca

SEQ ID NO: 599 - DNA, 4489 bp, Homo sapiens
ctttgggaggctgaggcaggcagattgcctgagctcaggagtttgagatcagcctgggcaacatcatgaaccccatttctactaaaatacaaaaaattatctgggcatggtggtgtacacctgtagccctagctgtttgggaggctaaggcacgagaattgcttgaacccgggaggcagaggttgcagtgagccaagatcatgccactgcactccagcttggcaacagagcaagactcttgtctccagaaataaaaataaataaattgtattaacatcctgatagtttatctgtttagtacctagcaagaaagaaaatgttgaacatcttaagaagagggtcatttaaaaggcctcttaaagatcatgtttgttacagtgcttaaaaattaatatgttcatctgcaaaatggaataaaaaatctgttaaaaatatatttcactaaatagtttaagatgagtcatatttgtgggttttcattttaaattttctttctctaggtgaagctgtacttcacaaaaacagtagaggagccgtcaaatccagaggctagcagttcaacttctgtaacaccagatgttagtgacaatgaacctgatcattatagatattctgacaccactgactctgatccagagaatgaaccttttgatgaagatcagcatacacaaattacaaaagtctgaatttttttttatcaagagggataaaacaccatgaaaataaacttgaataaactgaaaatggacctttttttttttaatggcaataggacattgtgtcagattaccagttataggaacaattctcttttcctgaccaatcttgttttaccctatacatccacagggttttgacacttgttgtccagttgaaaaaaggttgtgtagctgtgtcatgtatatacctttttgtgtcaaaaggacatttaaaattcaattaggattaataaagatggcactttcccgttttattccagttttataaaaagtggagacagactgatgtgtatacgtaggaattttttccttttgtgttctgtcaccaactgaagtggctaaagagctttgtgatatactggttcacatcctacccctttgcacttgtggcaacagataagtttgcagttggctaagagaggtttccgaagggttttgctacattctaatgcatgtattcgggttaggggaatggagggaatgctcagaaaggaaataattttatgctggactctggaccatataccatctccagctatttacacacacctttctttagcatgctacagttattaatctggacattcgaggaattggccgctgtcactgcttgttgtttgcgcatttttttttaaagcatattggtgctagaaaaggcagctaaaggaagtgaatctgtattggggtacaggaatgaaccttctgcaacatcttaagatccacaaatgaagggatataaaaataatgtcataggtaagaaacacagcaacaatgacttaaccatataaatgtggaggctatcaacaaagaatgggcttgaaacattataaaaattgacaatgatttattaaatatgttttctcaattgtaacgacttctccatctcctgtgtaatcaaggccagtgctaaaattcagatgctgttagtacctacatcagtcaacaacttacacttattttactagttttcaatcataatacctgctgtggatgcttcatgtgctgcctgcaagcttcttttttctcattaaatataaaatattttgtaatgctgcacagaaattttcaatttgagattctacagtaagcgttttttttctttgaagatttatgatgcacttattcaatagctgtcagccgttccacccttttgaccttacacattctattacaatgaattttgcagttttgcacattttttaaatgtcattaactgttagggaattttacttgaatactgaatacatataatgtttatattaaaaaggacatttgtgttaaaaaggaaattagagttgcagtaaactttcaatgctgcacacaaaaaaaagacatttgatttttcagtagaaattgtcctacatgtgctttattgatttgctattgaaagaatagggtttttttttttttttttttttttttttttaaatgtgcagtgttgaatcatttcttcatagtgctcccccgagttgggactagggcttcaatttcacttcttaaaaaaaatcatcatatatttgatatgcccagactgcatacgattttaagcggagtacaactactattgtaaagctaatgtgaagatattattaaaaaggtttttttttccagaaatttggtgtcttcaaattataccttcaccttgacatttgaatatccagccattttgtttcttaatggtataaaattccattttcaataacttattggtgctgaaattgttcactagctgtggtctgacctagttaatttacaaatacagattgaataggacctactagagcagcatttatagagtttgatggcaaatagattaggcagaacttcatctaaaatattcttagtaaataatgttgacacgttttccataccttgtcagtttcattcaacaatttttaaatttttaacaaagctcttaggatttacacatttatatttaaacattgatatatagagtattgattgattgctcataagttaaattggtaaagttagagacaactattctaacacctcaccattgaaatttatatgccaccttgtctttcataaaagctgaaaattgttacctaaaatgaaaatcaacttcatgttttgaagatagttataaatattgttctttgttacaatttcgggcaccgcatattaaaacgtaactttattgttccaatatgtaacatggagggccaggtcataaataatgacattataatgggcttttgcactgttattatttttcctttggaatgtgaaggtctgaatgagggttttgattttgaatgtttcaatgtttttgagaagccttgcttacattttatggtgtagtcattggaaatggaaaaatggcattatatatattatatatataaatatatattatacatactctccttactttatttcagttaccatccccatagaatttgacaagaattgctatgactgaaaggttttcgagtcctaattaaaactttatttatggcagtattcataattagcctgaaatgcattctgtaggtaatctctgagtttctggaatattttcttagactttttggatgtgcagcagcttacatgtctgaagttacttgaaggcatcacttttaagaaagcttacagttgggccctgtaccatcccaagtcctttgtagctcctcttgaacatgtttgccatacttttaaaagggtagttgaataaatagcatcaccattctttgctgtggcacaggttataaacttaagtggagtttaccggcagcatcaaatgtttcagctttaaaaaataaaagtagggtacaagtttaatgtttagttctagaaattttgtgcaatatgttcataacgatggctgtggttgccacaaagtgcctcgtttacctttaaatactgttaatgtgtcatgcatgcagatggaaggggtggaactgtgcactaaagtgggggctttaactgtagtatttggcagagttgccttctacctgccagttcaaaagttcaacctgttttcatatagaatatatatactaaaaaatttcagtctgttaaacagccttactctgattcagcctcttcagatactcttgtgctgtgcagcagtggctctgtgtgtaaatgctatgcactgaggatacacaaaaataccaatatgatgtgtacaggataatgcctcatcccaatcagatgtccatttgttattgtgtttgttaacaaccctttatctcttagtgttataaactccacttaaaactgattaaagtctcattcttgtcattgtgtgggtgttttattaaatgagagtttataattcaaattgcttaagtccattgaagttttaattaatgggcagccaaatgtgaatacaaagttttcagtttttttttttcctgctgtccttcaaagcctactgtttaaaaaaaaaaaaaaaaaaaaacatggcctgagagtagagtatctgtctactcatgtttaattaaggaaaaacacttatttttagggctttagtcatcacttcataaattgtataagcacattaaatagcgttctagtcctgaaaaagtccaagattcttagaaaattgtgcatatttttattatgacagatgtttgaagataattccccagaatggatttgatactttagatttcaattttgtggcttttgtctattattctgtactctgccatcagcatatggaaagcttcatttactcatcatgacttgtgccatataaaaattgatatttcggaatagtctaaaggactttttgtact

SEQ ID NO: 600 - DNA, 1500 bp, Homo sapiens
cagctttaaaaaataaaagtagggtacaagtttaatgtttagttctagaaattttgtgcaatatgttcataacgatggctgtggttgccacaaagtgcctcgtttacctttaaatactgttaatgtgtcatgcatgcagatggaaggggtggaactgtgcactaaagtgggggctttaactgtagtatttggcagagttgccttctacctgccagttcaaaagttcaacctgttttcatatagaatatatatactaaaaaatttcagtctgttaaacagccttactctgattcagcctcttcagatactcttgtgctgtgcagcagtggctctgtgtgtaaatgctatgcactgaggatacacaaaaataccaatatgatgtgtacaggataatgcctcatcccaatcagatgtccatttgttattgtgtttgttaacaaccctttatctcttagtgttataaactccacttaaaactgattaaagtctcattcttgtcattgtgtgggtgttttattaaatgagagtttataattcaaattgcttaagtccattgaagttttaattaatgggcagccaaatgtgaatacaaagttttcagtttttttttttcctgctgtccttcaaagcctactgtttaaaaaaaaaaaaaaaaaaaaacatggcctgagagtagagtatctgtctactcatgtttaattaaggaaaaacacttatttttagggctttagtcatcacttcataaattgtataagcacattaaatagcgttctagtcctgaaaaagtccaagattcttagaaaattgtgcatatttttattatgacagatgtttgaagataattccccagaatggatttgatactttagatttcaattttgtggcttttgtctattattctgtactctgccatcagcatatggaaagcttcatttactcatcatgacttgtgccatataaaaattgatatttcggaatagtctaaaggactttttgtacttgaatttaatcatgttgtttctaatattcttaaaagcttgaagactaaagcatatcctttcaacaaagcatagtaaggtaataagaaagtgtagtttgtacaagtgttaaaaaaataaagtagacaatgttacagtgggacttattatttcaagtttacattttctccatgtaattttttaaaaagtaaatgaaaaaatgtgcaataatgtaaaatatgaagtgtatgtgtacacacattttatttttcggtatcttgggtatacgtatggttgaaaactatactggagtctaaaagtattctaatttataagaagacattttggtgatgtttgaaaaatagaaatgtgctagttttgtttttatatcatgtcctttgtacgttgtaatatgagctggcttggttcagtaaatgccatcaccatttccattgagaatttaaaactcaccagtgtttaatatgcaggcttccaaaggcttatgaaaaaaatcaagaccctt

SEQ ID NO: 601 - DNA, 6597 bp, Homo sapiens
tttcccggcgtgccccaggagagcggcgtggacgcgtgcgggcctagaggcccacgtgatccgcagggcggccgaggcaggaagctgtgagtgcgcggttgcggggtcgcattgtggctacggctttgcgtccccggcgggcagccccaggctggtccccgcctccgctctccccaccggcggggaaagcagctggtgtgggaggaaaggctccatcccccgccccctctctcccgctgttggctggcaggatcttttggcagtcctgtggcctcgctccccgcccggatcctcctgaccctgagattcgcgggtctcacgtcccgtgcacgccttgcttcggcctcagttaagcctttgtggactccaggtccctggtgagattagaaacgtttgcaaacatgtcccggatcgaaaagatgagcattctgggcgtgcggagttttggaatagaggacaaagataagcaaattatcactttcttcagcccccttacaattttggttggacccaatggggcgggaaagacgaccatcattgaatgtctaaaatatatttgtactggagatttccctcctggaaccaaaggaaatacatttgtacacgatcccaaggttgctcaagaaacagatgtgagagcccagattcgtctgcaatttcgtgatgtcaatggagaacttatagctgtgcaaagatctatggtgtgtactcagaaaagcaaaaagacagaatttaaaactctggaaggagtcattactagaacaaagcatggtgaaaaggtcagtctgagctctaagtgtgcagaaattgaccgagaaatgatcagttctcttggggtttccaaggctgtgctaaataatgtcattttctgtcatcaagaagattctaattggcctttaagtgaaggaaaggctttgaagcaaaagtttgatgagattttttcagcaacaagatacattaaagccttagaaacacttcggcaggtacgtcagacacaaggtcagaaagtaaaagaatatcaaatggaactaaaatatctgaagcaatataaggaaaaagcttgtgagattcgtgatcagattacaagtaaggaagcccagttaacatcttcaaaggaaattgtcaaatcctatgagaatgaacttgatccattgaagaatcgtctaaaagaaattgaacataatctctctaaaataatgaaacttgacaatgaaattaaagccttggatagccgaaagaagcaaatggagaaagataatagtgaactggaagagaaaatggaaaaggtttttcaagggactgatgagcaactaaatgacttatatcacaatcaccagagaacagtaagggagaaagaaaggaaattggtagactgtcatcgtgaactggaaaaactaaataaagaatctaggcttctcaatcaggaaaaatcagaactgcttgttgaacagggtcgtctacagctgcaagcagatcgccatcaagaacatatccgagctagagattcattaattcagtctttggcaacacagctagaattggatggctttgagcgtggaccattcagtgaaagacagattaaaaattttcacaaacttgtgagagagagacaagaaggggaagcaaaaactgccaaccaactgatgaatgactttgcagaaaaagagactctgaaacaaaaacagatagatgagataagagataagaaaactggactgggaagaataattgagttaaaatcagaaatcctaagtaagaagcagaatgagctgaaaaatgtgaagtatgaattacagcagttggaaggatcttcagacaggattcttgaactggaccaggagctcataaaagctgaacgtgagttaagcaaggctgagaaaaacagcaatgtagaaaccttaaaaatggaagtaataagtctccaaaatgaaaaagcagacttagacaggaccctgcgtaaacttgaccaggagatggagcagttaaaccatcatacaacaacacgtacccaaatggagatgctgaccaaagacaaagctgacaaagatgaacaaatcagaaaaataaaatctaggcacagtgatgaattaacctcactgttgggatattttcccaacaaaaaacagcttgaagactggctacatagtaaatcaaaagaaattaatcagaccagggacagacttgccaaattgaacaaggaactagcttcatctgagcagaataaaaatcatataaataatgaactaaaaagaaaggaagagcagttgtccagttacgaagacaagctgtttgatgtttgtggtagccaggattttgaaagtgatttagacaggcttaaagaggaaattgaaaaatcatcaaaacagcgagccatgctggctggagccacagcagtttactcccagttcattactcagctaacagacgaaaaccagtcatgttgccccgtttgtcagagagtttttcagacagaggctgagttacaagaagtcatcagtgatttgcagtctaaactgcgacttgctccagataaactcaagtcaacagaatcagagctaaaaaaaaaggaaaagcggcgtgatgaaatgctgggacttgtgcccatgaggcaaagcataattgatttgaaggagaaggaaataccagaattaagaaacaaactgcagaatgtcaatagagacatacagcgcctaaagaacgacatagaagaacaagaaacactcttgggtacaataatgcctgaagaagaaagtgccaaagtatgcctgacagatgttacaattatggagaggttccagatggaacttaaagatgttgaaagaaaaattgcacaacaagcagctaagctacaaggaatagacttagatcgaactgtccaacaagtcaaccaggagaaacaagagaaacagcacaagttagacacagtttctagtaagattgaattgaatcgtaagcttatacaggaccagcaggaacagattcaacatctaaaaagtacaacaaatgagctaaaatctgagaaacttcagatatccactaatttgcaacgtcgtcagcaactggaggagcagactgtggaattatccactgaagttcagtctttgtacagagagataaaggatgctaaagagcaggtaagccctttggaaacaacattggaaaagttccagcaagaaaaagaagaattaatcaacaaaaaaaatacaagcaacaaaatagcacaggataaactgaatgatattaaagagaaggttaaaaatattcatggctatatgaaagacattgagaattatattcaagatgggaaagacgactataagaagcaaaaagaaactgaacttaataaagtaatagctcaactaagtgaatgcgagaaacacaaagaaaagataaatgaagatatgagactcatgagacaagatattgatacacagaagatacaagaaaggtggctacaagataaccttactttaagaaaaagaaatgaggaactaaaagaagttgaagaagaaagaaaacaacatttgaaggaaatgggtcaaatgcaggttttgcaaatgaaaagtgaacatcagaagttggaagagaacatagacaatataaaaagaaatcataatttggcattagggcgacagaaaggttatgaagaagaaattattcattttaagaaagaacttcgagaaccacaatttcgggatgctgaggaaaagtatagagaaatgatgattgttatgaggacaacagaacttgtgaacaaggatctggatatttattataagactcttgaccaagcaataatgaaatttcacagtatgaaaatggaagaaatcaataaaattatacgtgacctgtggcgaagtacctatcgtggacaagatattgaatacatagaaatacggtctgatgccgatgaaaatgtatcagcttctgataaaaggcggaattataactaccgagtggtgatgctgaagggagacacagccttggatatgcgaggacgatgcagtgctggacaaaaggtattagcctcactcatcattcgcctggccctggctgaaacgttctgcctcaactgtggcatcattgccttggatgagccaacaacaaatcttgaccgagaaaacattgaatctcttgcacatgctctggttgagataataaaaagtcgctcacagcagcgtaacttccagcttctggtaatcactcatgatgaagattttgtggagcttttaggacgttctgaatatgtggagaaattctacaggattaaaaagaacatcgatcagtgctcagagattgtgaaatgcagtgttagctccctgggattcaatgttcattaaaaatatccaagatttaaatgccatagaaatgtaggtcctcagaaagtgtataataagaaacttatttctcatatcaacttagtcaataagaaaatatattctttcaaaggaacattgtgtctaggattttggatgttgagaggttctaaaatcatgaaacttgtttcactgaaaattggacagattgcctgtttctgatttgctgctcttcatcccattccaggcagcctctgtcaggccttcagggttcagcagtacagccgagactcgactctgtgcctccctccccagtgcaaatgcatgcttcttctcaaagcactgttgagaaggagataattactgccttgaaaatttatggttttggtatttttttaaatcatagttaaatgttacctctgaatttacttccttgcatgtggtttgaaaaactgagtattaatatctgaggatgaccagaaatggtgagatgtatgtttggctctgcttttaactttataaatccagtgacctctctctctgggacttggtttccccaactaaaatttgaagtagttgaatggggtctcaaagtttgacaggaaccttaagtaatcatctaagtcagtacccaccaccttcttctcctacatatcccttccagatggtcatccagactcagagctctctctacagagaggaaattctccactgtgcacacccacctttggaaagctctgaccacttgaggcctgatctgcccatcgtgaagaagcctgtaacactcctctgcgtctatcctgtgtagcatactggcttcaccatcaatcctgattcctctctaagtgggcattgccatgtggaaggcaagccaggctcactcacagagtcaaggcctgctccctgtagggtccaaccagacctggaagaacaggcctctccatttgctcttcagatgccacttctaagaaaagcctaatcacagtttttcctggaattgccagctgacatcttgaatccttccattccacacagaatgcaaccaagtcacacgcttttgaattatgctttgtagagttttgtcattcagagtcagccaggaccataccgggtcttgattcagtcacatggcatggttttgtgccatctgtagctataatgagcatgtttgcctagacagcttttctcaactgggtccagaagagaattaagccctaaggtcctaaggcatctatctgtgctaggttaaatggttggcccccaaagatagacaggtcctgatttctagaacccgtgactgttactttatacagcaaaggaaactttgcagatgtgattaaagctaaggaccttaagacagagtatcctgggggtggtggtggggtgggggggggtcctaaatgtaatcacgagtaagattaagagcaaatcaattctagtcatatattaaacatccacaataaccaagatatttttatcccaagaatgcaagatttcagaaaatgaaaaatctgttgataaatccatcactataataaaaccgaaggtgaaaaaaattctgaaaaaattctagcagctatatttgataaaattcaacatctcctagctttagcaaactcacagttttgcaaataatattttcttaatgttatctgttgctaaatcaaaattaaacagtcatcttaactgcaaaataaaacatttctcagtaaatattaaagccagttaccttctatcaacatgttaatgaaagtgctagttgttgcagcaaagaataacaaaggcaatacacgatcaatataggcagtgaaacaaaagtatcatttgcaagttaaaacagacttcccaattttaaatctggtttccccctgaatatgtggcatccttggcagcacttctgagagtggctgctttcattccaagaagcccatgggtttggaggtgggataggtgcctttctggcttctcattgctgcttctagatcagtctccaaatatcccccttccccacattggaatgaatagccatcacagcatggatggaggttagaatgagccagactgcctgggctcaaatcctagcacaccactcactagctggggaccttgagcaagttatttgtcctgttttctgtttccttatatgtaaaagtgggtaaaatggtacatattttgtagggttgttatgaagattgaatgacattatttacaaactgcttagaactgcttgccacctactaaatactgtgtaagtgttcaagaaaaagctgtcttcatttca

SEQ ID NO: 602 - DNA, 1500 bp, Homo sapiens
aattttaatgttttgttccattagttattttaactattttgtaataactgacactttccggttttttttaacctggtacagcaagagactatttctcactggtcttccccacttgcatcctttggcacatacatttatgtattaggttctgtaaattatttgcttgggattgtatgactggagaaacatttcctacatttttccaaggcaggcagaggcaaattataccactacagtaattccaaatttgtgtttcatttaaatgtcctccactattgtttcagtaatttttatgtatgtttctctaggcccttaaatgtgatatccctccattaagtttgtttccaagaaagcaatattctcagttacttctgagacaggtaacttctctttcccttatttttaaagatatctattgctgggagcactgatcggaatggattacctctacattcttcatatttgcagactgcttttagttttagttcccagacttttggtcttaaagacgcctttacactaaaaaattacgggggacctcaaagagcgtgtacgtgagttataattatcaacatttactcaattagaaattaaaattggtatttctaagcgcaagaatacacatgcgcacattccattaaccgccactgcaatggcgtcatcacatgttatgtgatcactggaaattactacacgaacgttagagagagaatgagaatgaaaaggaaaatagttttgacacgaactgaccccgcttcctgggtctccaatccaccccaccactacccccattccaggagtcccaggatcaagctttgggaagcgccatccgtcacaggtcttggtctccccttccaaaagtcagtgcctctccaggctgcccatccccagcaaagatccggaagtccgctgcccctggcaacagcacccagcacctagccctctgcttcgccgtaccgcacccggaagtcggagctgcgcacgcaccgcgggactctgatttcccggcgtgccccaggagagcggcgtggacgcgtgcgggcctagaggcccacgtgatccgcagggcggccgaggcaggaagctgtgagtgcgcggttgcggggtcgcattgtggctacggctttgcgtccccggcgggcagccccaggctggtccccgcctccgctctccccaccggcggggaaagcagctggtgtgggaggaaaggctccatcccccgccccctctctcccgctgttggctggcaggatcttttggcagtcctgtggcctcgctccccgcccggatcctcctgaccctgagattcgcgggtctcacgtcccgtgcacgccttgcttcggcctcagttaagcctttgtgggctccaggtccctggtgagattagaaacgtttgcaaacatgtcccggatcgaaaagatgagcattctgggcgtgcggagttttggaatagaggacaaagataagcaaattatcactttcttcagcccccttacaatt

SEQ ID NO: 603 - DNA, 1530 bp, Homo sapiens
tcttaaagacgcctttacactaaaaaattacgggggacctcaaagagcgtgtacgtgagttataattatcaacatttactcaattagaaattaaaattggtatttctaagcgcaagaatacacatgcgcacattccattaaccgccactgcaatggcgtcatcacatgttatgtgatcactggaaattactacacgaacgttagagagagaatgagaatgaaaaggaaaatagttttgacacgaactgaccccgcttcctgggtctccaatccaccccaccactacccccattccaggagtcccaggatcaagctttgggaagcgccatccgtcacaggtcttggtctccccttccaaaagtcagtgcctctccaggctgcccatccccagcaaagatccggaagtccgctgcccctggcaacagcacccagcacctagccctctgcttcgccgtaccgcacccggaagtcggagctgcgcacgcaccgcgggactctgatttcccggcgtgccccaggagagcggcgtggacgcgtgcgggcctagaggcccacgtgatccgcagggcggccgaggcaggaagctgtgagtgcgcggttgcggggtcgcattgtggctacggctttgcgtccccggcgggcagccccaggctggtccccgcctccgctctccccaccggcggggaaagcagctggtgtgggaggaaaggctccatcccccgccccctctctcccgctgttggctggcaggatcttttggcagtcctgtggcctcgctccccgcccggatcctcctgaccctgagattcgcgggtctcacgtcccgtgcacgccttgcttcggcctcagttaagcctttgtgggctccaggtccctggtgagattagaaacgtttgcaaacatgtcccggatcgaaaagatgagcattctgggcgtgcggagttttggaatagaggacaaagataagcaaattatcactttcttcagcccccttacaattttggttggacccaatggggcgggaaagacggtaagtcttcagtagccgccttcagtttacaggtcgctacatctttcggagaataaaatgggaagttgagaactctccttaggagcagaagcgtccctagggctccacaggtgtaggcccttaaagtgccttagggtgtggcctgcaggctacagcgaccttaggagtttgcctgaagcagtctcggaaggatgtccggacctggcctggggacaaggtttacttaagaatcccacgataccgggagctgtcgccgctcactcagagttcagttcccactggatgccctttggtctgtattgatgtttttaacgctgtctccttgctttcaaagcatagcattcacttcccagtagttgtcccatacaagaattcctttaaaagttataaaatgatacatacatgactaaagagtttccaagtatgccaactgtccagacataatacatggaaaataaataaattcaaaatgtaactgatgtagtggggcttaacttgga

SEQ ID NO: 604 - DNA, 1084 bp, Homo sapiens
agccgtttgggaggctgaggctgggggattgcttgagcccaggaggtcgagaggtcgaggctgcagtaagccatgatcatgcagctgcactgcagcctgggcagcagaatgagaccctgtctcttaaacaaaaagttcctacagcctggagttaatgtgagaattaaataaatgtatgtaagagtgcttagtacaatacagtacttaactgttagccattcttattattaacttaaattagtttaaagggtttcagttgaaaataattatttttttcccaagtaacaattcttcatattaggataacttcttagttatatagcatttctgtgaacttacagcattaacacttaatcatatttttattacaggttttataatgtcagattttatcttttatagtttccatgataaataatatttttgtaatgaattcatattttatggtaaacttctgtggttctcttataacgaaataatgtaattttctatttctttagaccatcattgaatgtctaaaatatatttgtactggagatttccctcctggaaccaaaggaaatacatttgtacacgatcccaaggtaatggtgctagtacaattttgtatttttataattataaaaatgataatagcttattatagaaaacttggcactggaaaactataaagagaaatgaaagtcagccccacacagttttagcacccagtagtaaccgttgttgacattttcatgtgttttcctcctcctttaaatactgttttatatagctgatgtcatactcttaattttgtattctgggtttttttccccacttaacattatcatgaagtcctatgtcattaaaaaactatcatctgggtgtttggtatgtaagtgtttcttttaatctttatactgctttgtatgtctgagatattttctacttaaagtgcatgaacactttagtagttatgtaattttcttacattagattgctttcagtttttcattaaaatgtaccatgataagccaggcttgggggtgtgtgccaatactcccagatagctctagaggctgagatgggaggattgcttcagccc

SEQ ID NO: 605 - DNA, 1152 bp, Homo sapiens
agcttgtgcggggaaactccttcttataaaaccatcaggtctcgtgagacttactcactgtcacaagaacagcatgggaaagacctgtccccatgattcaattaccttcaactgggtacctcctgcaacatgtggaaattcaagatgagatttgggtggagacaaagacaaaccaaatcattctacctttctataaacttgcaatttttaaggataaaaaacatttttgatgcttacagagataaaattcatttatttgaaaaatctgcatacctgatctcctaatgatgctgaataaaggaggtagatagtatatcatttttgtaaattaattaaacagtattcttctatattttggatagcatgtaaaaatatcactcattttggatgtttttctttttgttccctcattttgggtaagattgcttatgcctttttctcagaaccaacactggtgcttattaaagtaacataagttttttctgtgttttccttcaaaggttgctcaagaaacagatgtgagagcccagattcgtctgcaatttcgtgatgtcaatggagaacttatagctgtgcaaagatctatggtgtgtactcagaaaagcaaaaagacagaatttaaaactctggaaggagtcattactagaacaaagtaggtgtttatatgatatttgaatttctgttcattttcagtcttttaggtctgtaagttgatggttgttttctactataagtttaggggagcatattaaatttttttcaatagactttagactttatttttttagagcagttttgggtttatagcaaaattgggcagaaagtactgagcttccattttctccctacccccacgcacacacagcctcctccactatgaacatttgattttttgtggatactatttgtcagttaaatagaatgatcccatgaaagacttagggttatgttccattctcttgagtaatttctgaacagttgctgaattgaaagcacataatcactcaaatacaggttgaatgagtaaaaaattctagtgtcatgtttaagaatgggtgagatgagaagcagacaagtaggaaagaatgataaattgttcctttcaaccattatcattctgttagaggcaggtatcattttctaatggatatg

SEQ ID NO: 606 - DNA, 1186 bp, Homo sapiens
ccgtgcctggcccagtgtaatattttcaaaatacaaattgaaatgtataaaaaacagtaaagacagatattgcctctgctcaccagagcagtctgttactgaagaaagaaccccattctaagatgtttttaacttacctttgcctgtctgctattgatcatcatgttttgttttattctttgtctcttatttttaagacagttaatgctctatatagtatctctaagtattctaaattattatatttaaaagtccaaatatgtaaaaaataaattctggcttcctttcctgaactactttgttttacatatcttttcatctgtgaaccgttaaatagtttaagagttacactttttagcatgatgaagccatttctaacgggataggtgaagggcctttttttttattcttttaaagaagtacagtatgaattgattaagcaatagaatagatacactgaaggttattttacatatattcttgattttcattttctgtaggcatggtgaaaaggtcagtctgagctctaagtgtgcagaaattgaccgagaaatgatcagttctcttggggtttccaaggctgtgctaaataatgtcattttctgtcatcaagaagattctaattggcctttaagtgaaggaaaggctttgaagcaaaagtttgatgagattttttcagcaacaaggtttgtaacccttaaatagactttgtagtccattaagttattgaactgtgtttgcaatttggatgcttctttttaacagaaaaaatttaaaaagcagaaaggtcatcagttactacctctcatccagcagcaaccattgggcatattttctttcacttgtctttctgtgcgtatatttatttacctgattgacagtataaatgtaatttttttcacttaccattatgtcataggcattttacaagttattaaaaactcattgtaactgtaatcttagtgacagcataatatcccactgtatgaatatataccataatttactttgccagaaatttgatttttgtttcatatcttcaaagatacattaaagccttagaaacacttcggcaggtacgtcagacacaaggtcagaaagtaaaagaatatcaaatggaactaaaatatctgaagcaatataaggaaaaagcttgtgagattcgtgatcagattacaagtaagga

SEQ ID NO: 607 - DNA, 1205 bp, Homo sapiens
ccgagaaatgatcagttctcttggggtttccaaggctgtgctaaataatgtcattttctgtcatcaagaagattctaattggcctttaagtgaaggaaaggctttgaagcaaaagtttgatgagattttttcagcaacaaggtttgtaacccttaaatagactttgtagtccattaagttattgaactgtgtttgcaatttggatgcttctttttaacagaaaaaatttaaaaagcagaaaggtcatcagttactacctctcatccagcagcaaccattgggcatattttctttcacttgtctttctgtgcgtatatttatttacctgattgacagtataaatgtaatttttttcacttaccattatgtcataggcattttacaagttattaaaaactcattgtaactgtaatcttagtgacagcataatatcccactgtatgaatatataccataatttactttgccagaaatttgatttttgtttcatatcttcaaagatacattaaagccttagaaacacttcggcaggtacgtcagacacaaggtcagaaagtaaaagaatatcaaatggaactaaaatatctgaagcaatataaggaaaaagcttgtgagattcgtgatcagattacaagtaaggaagcccagttaacatcttcaaaggaaattgtcaaatcctatgagaatgaacttgatccattgaaggtaacttgattttatttttaattgacaaaaattgtatatctttatggtatacagcatgatgttttgatataagtatacatcgtggactggctaaatcaagctatttaacgttcattacttcaatttttttatggtgagaacacttaaaatctactctcttagcaattatatattgttattaactaaagtcacagtgatgtacagtagttaatttcttgtatactaaataggtagtcctttttttgctatagtagcattctccccttatttgtatatgaaactgaatggcttgtatatttcttgaattatcagggagctaatgttttaggtctatgttagtctttaaattgctgaaagagcttggatttgaaagaaaacaaatttgtagcatcacactaaattagtagtatagatcactaggtgttaaatagcaatatcattacccaaccttacagttctgtattaatatttttaaaaattgacatctttctagagaattt

SEQ ID NO: 608 - DNA, 1129 bp, Homo sapiens
aggccactgagctcccttgttgtactttacttgctcagagtcctctgtggttgagcaagctttggattaaagtatactcttcatgtaaatttgcctataggctcagaatgcattggtaactcaccatgaatttctagccttctcagtagtcctgacttaaaaaaatacattaaatagttacctttttaaggattaagtaactctaaatgcccaatgaatgaataatgacttttgtggcaggtgttgaggacaggacatggtgtttggagttagaagtggaatttaattcctgcttctctctactagctgtgaggacttgggccaagttacttaatgtctctgaacttcagtttctctaggcctgctctacagtgttattgttagccttaaatgagatcacttttactaaatgcctggacctggagtatcttacttgtcttcatctatcagccatgtaagctatagtgagttttatttatgtaatgtttctttattttcagaatcgtctaaaagaaattgaacataatctctctaaaataatgaaacttgacaatgaaattaaagccttggatagccgaaagaagcaaatggagaaagataatagtgaactggaagagaaaatggaaaaggtttgtggtggtagaattttgttctgcttcaaaattttgggattattgtaatgaactttatttgaatccattttgccatccacattggaaaaaaacaaatacagatcttgttacttctatgtatatgttaaaatgaaggatattgaataaggtttggtttatatttgatacctcaaagtgatcatattttcttatgtttgtacattaaagctttttattttggtgttacacaggtttttcaagggactgatgagcaactaaatgacttatatcacaatcaccagagaacagtaagggagaaagaaaggaaattggtagactgtcatcgtgaactggaaaaactaaataaagaatctaggcttctcaatcaggaaaaatcagaactgcttgttgaacagggtaggacaaaatgtttatttggtcgtttttcctactatgatgttatacattttctgtatgaatgaagaatctccaaggacttatgctgagtgaaaagccaa

SEQ ID NO: 609 - DNA, 1166 bp, Homo sapiens
tgctctacagtgttattgttagccttaaatgagatcacttttactaaatgcctggacctggagtatcttacttgtcttcatctatcagccatgtaagctatagtgagttttatttatgtaatgtttctttattttcagaatcgtctaaaagaaattgaacataatctctctaaaataatgaaacttgacaatgaaattaaagccttggatagccgaaagaagcaaatggagaaagataatagtgaactggaagagaaaatggaaaaggtttgtggtggtagaattttgttctgcttcaaaattttgggattattgtaatgaactttatttgaatccattttgccatccacattggaaaaaaacaaatacagatcttgttacttctatgtatatgttaaaatgaaggatattgaataaggtttggtttatatttgatacctcaaagtgatcatattttcttatgtttgtacattaaagctttttattttggtgttacacaggtttttcaagggactgatgagcaactaaatgacttatatcacaatcaccagagaacagtaagggagaaagaaaggaaattggtagactgtcatcgtgaactggaaaaactaaataaagaatctaggcttctcaatcaggaaaaatcagaactgcttgttgaacagggtaggacaaaatgtttatttggtcgtttttcctactatgatgttatacattttctgtatgaatgaagaatctccaaggacttatgctgagtgaaaagccaatcttaaaaggctatacacagtatgtttccatttatataacatttttataatgtcaaaattttagaaatagtggagaaattagtggttgccagggatactgggtaagagaaaggacaggagggagctaggtatggttatgattagaacaaaaagagagtccttgtagtattggaactgttcagtatcttgactgccatagtggatatatgaaccgacacaggtgataaaattatatagaacttaatatacacacatccacatgctcaggggtacaaataaaattggggaaatttgaataagattgatgaattatatcaatatcagtattctggttgtgatattttactgcagttttgcaaaatgttatcattgggagaaactgggcaaaatgtacaagag

SEQ ID NO: 610 - DNA, 1194 bp, Homo sapiens
ccaatcttaaaaggctatacacagtatgtttccatttatataacatttttataatgtcaaaattttagaaatagtggagaaattagtggttgccagggatactgggtaagagaaaggacaggagggagctaggtatggttatgattagaacaaaaagagagtccttgtagtattggaactgttcagtatcttgactgccatagtggatatatgaaccgacacaggtgataaaattatatagaacttaatatacacacatccacatgctcaggggtacaaataaaattggggaaatttgaataagattgatgaattatatcaatatcagtattctggttgtgatattttactgcagttttgcaaaatgttatcattgggagaaactgggcaaaatgtacaagagacacactgcattattttttataactcgtgaatctgcagctatctcaactttttaagcaccagttgaaaaaaaaattatgagattttttttttaaaaggtcgtctacagctgcaagcagatcgccatcaagaacatatccgagctagagattcattaattcagtctttggcaacacagctagaattggatggctttgagcgtggaccattcagtgaaagacagattaaaaattttcacaaacttgtgagagagagacaagaaggggaagcaaaaactgccaaccaactgatggcaagtattttgaaatacagtatttgttattttgtttgcatcatattctctacttgaattgttttaatttttggttggactccattttggcatatttttctattagtgttaggataaaatctgctacaaggcagaaaaacctttattgaagcaaatgttcttaagtgtataaagataaaaatatgaagaaaatgtaaacctacattttttatttggttttaagtaaaaatttttaaaaactaattgcagagaaaacatttgctcacagttaatgattatctctgggtaatggttttgattgtttttaaaatacagtcttgaaccacatgttttggtcagtgatagaccacatatttgacattggtcccataaaattataatactgtattttactgtatgttttctgtgtttagatatgtttagatacataaatacttatcatcatgttacagttgccaaagtattcagtacagtaatatgctgtataggtttgtagccca

SEQ ID NO: 611 - DNA, 1207 bp, Homo sapiens
gaaaacatttgctcacagttaatgattatctctgggtaatggttttgattgtttttaaaatacagtcttgaaccacatgttttggtcagtgatagaccacatatttgacattggtcccataaaattataatactgtattttactgtatgttttctgtgtttagatatgtttagatacataaatacttatcatcatgttacagttgccaaagtattcagtacagtaatatgctgtataggtttgtagcccataaacaataggctataccatatagtctatgtgtgtattaaactataccatgtaggcttatgtaaatacattctgatgttcacacaatgataaaattgcctaatgatgcatttcttggaatatatccctgctgagcaacacacgactgtacttttttgtattttcttcagtgtacatatattccttttgcaattaaaaaacttaaattgtttagtaaattattaatgctcattctttacatatgcatttagaatgactttgcagaaaaagagactctgaaacaaaaacagatagatgagataagagataagaaaactggactgggaagaataattgagttaaaatcagaaatcctaagtaagaagcagaatgagctgaaaaatgtgaagtatgaattacagcagttggaaggatcttcagacaggattcttgaactggaccaggagctcataaaagctgtaagatattgtttgaataatctaataattttaagatataatacttttagaagtattttgtctatttttgatcctaagattatagcattttaataaaaacatcaactttgtcttattctcatgtaaaatgaattcatctgaatatcttgatcttctgactctttggttctacaacccgatagcctgaaaattagaatcacatagggagctttttaaagatactgtactcagaccttaaagcttcagaccttccaaatcaaaatctctgagaatggggcatagaaatgtacattcaaaacacaacaaaactggctaattcttatgagcaccttgattaagaacacttaccaggccgggtgcggtgtctcacacctgtaatcccagcactttgggaagccaaggcaggcagataacgtgaggtcaggagttcaagacctgtccagccaacatggtgaaaccccgtctctactaaaaatacaaaaattagctgggcgtggtgg

SEQ ID NO: 612 - DNA, 1183 bp, Homo sapiens
atgtaaacatttatttttgctccataactcaccattgtagcatacatttttgtcagtttagcacttcatcagtgttgtcttgttggggtggggagatacttggtcagggaccacatcacactatttttatagtttctacataccaggcaatatagtgaattacatggggacataataaatatttaattgttgactgaggactcactaatctgtgtacttagacacatgtctcctaattttacagtaattctcacatttctttcctgtttgacccttctaggtttatttactaattctctaccattataacatagtaaggtcactttaataagatataccttagagcatatatagtgccttatgtttttttctcttgttggatgcaaacagtaatatttggaacattctgaggagtagttaatttctaatacactttgtcattattttaattcttgcacaaaatatataacacctttgcatttgtatgaattattgactaggaacgtgagttaagcaaggctgagaaaaacagcaatgtagaaaccttaaaaatggaagtaataagtctccaaaatgaaaaagcagacttagacaggaccctgcgtaaacttgaccaggagatggagcagttaaaccatcatacaacaacacgtacccaaatggagatgctgaccaaagacaaagtatgatttttctttttgttctaattatactgtctggtacttaaaatagcctaccttgcactcataagtcatagactataaggtattaagttggtattgactatattttagaggctaagtgagcttagtactctatataatagactttcaagcttaaaagttattgtttaattacaaaaagttaatacagaaatgtatatatatgtatatacacacatgcacattactgttaacttttaacatacacaaattttaaaattttatattgttcgacttggtactccactcttaaggcttagaaagaccatccccacttgaagactttaagaactttaagaaattttatattttattttcatatttttatagttttaagcttagaactttagtcagtctagaatttatttttgttcttgatataatgtggagatatagactttatttttaaaagattttttttttacctataggctgacaaagatgaacaaatcagaaaaata

SEQ ID NO: 613 - DNA, 1158 bp, Homo sapiens
acccaaatggagatgctgaccaaagacaaagtatgatttttctttttgttctaattatactgtctggtacttaaaatagcctaccttgcactcataagtcatagactataaggtattaagttggtattgactatattttagaggctaagtgagcttagtactctatataatagactttcaagcttaaaagttattgtttaattacaaaaagttaatacagaaatgtatatatatgtatatacacacatgcacattactgttaacttttaacatacacaaattttaaaattttatattgttcgacttggtactccactcttaaggcttagaaagaccatccccacttgaagactttaagaactttaagaaattttatattttattttcatatttttatagttttaagcttagaactttagtcagtctagaatttatttttgttcttgatataatgtggagatatagactttatttttaaaagattttttttttacctataggctgacaaagatgaacaaatcagaaaaataaaatctaggcacagtgatgaattaacctcactgttgggatattttcccaacaaaaaacagcttgaagactggctacatagtaaatcaaaagaaattaatcagaccagggacagacttgccaaattgaagtaagttgcaacatttggagatgtaatagaaatctcttatttcatgcttacctgtttaattgttttaaaataatttattgtcatgaaatggtatgttatattgataaactttagttcttacatacaaggagacttcagaaagttcatggaaaaatggaattaaaagataaaaattttaaataaactgtatttctcaacataagctccatcaagttcaagactcttctgagcagtgataccagcaatttagttcagtcctaaagaactgagggtcctgggaatttaaccatgtcagtgtagtcttttttacattgctagcataaaaatgggtgccctttaaagatttttttaagattaagaaactagaagacaggaggagccaaatcaggactgtaaggtggatgcctaatgatttcccatcgaaactcttgcaaatggcccttgtttgatgagaggaatgagcaggaacattgttgtggtggaaaaggactctctggtga

SEQ ID NO: 614 - DNA, 1176 bp, Homo sapiens
gataaattgtactagtaagcaaaatctttgatgaatgagagggaatgactgatctggacgcaagtggatgacagcaacaaggagggggaggatacaaaagaaacagtatttacaggagagtaaggaagtagtatttgtgaaaggactaaagggaattacggggatgttctcttgtcttctttctgtccaatagtcctagcaagcatcttgctgaggcttaacctgggatcaaagaccatgaacccccagaaaccaggcagaattctgtgtacatttttctgggagcaggcccatgagtaggactggcaggtgagtcagtgtcctagggggagagttaaggcagaagtggactagtccctcaacttctgaaaaaaattatttggtcataccaaactcttgtcatgatttgttggcagaatttgtcttgtttttgcctactcaaattttcaaactaatttctcctattttaaaatgaaaatccatatttgctcttattttagcaaggaactagcttcatctgagcagaataaaaatcatataaataatgaactaaaaagaaaggaagagcagttgtccagttacgaagacaagctgtttgatgtttgtggtagccaggattttgaaagtgatttagacaggcttaaagaggaaattgaaaaatcatcaaaacagcgaggtaagttgtctactttatattatcaggatactttgacacctttgaattttcattcacaggtaactgttaaggatggggaatttaaaaacctggttatggagcctaatggcttggatttcagtcctggctctacaacttactcactgtgtgactttaggcaagttactgaaaccttcctgtgtttcattgtctataaaatgaggacacaactaccacctgtggtactgaggtgtgaatgagattgtaattataaagcccttagaacagtgcctggcacatagaaagctctcagtaggcattttgttatacttataatgtgttaccaaaaaatatttatacaaatctgaatgtatcatgctctttggaagcgaatatcggaattttaaatatcagaatttttatttcttttataatatatttataaagcaagaataatcatatatttatagaaaaagatacaaccgtattcagaatactgtattttatgtttttttctcatt

SEQ ID NO: 615 - DNA, 1238 bp, Homo sapiens
tactttgacacctttgaattttcattcacaggtaactgttaaggatggggaatttaaaaacctggttatggagcctaatggcttggatttcagtcctggctctacaacttactcactgtgtgactttaggcaagttactgaaaccttcctgtgtttcattgtctataaaatgaggacacaactaccacctgtggtactgaggtgtgaatgagattgtaattataaagcccttagaacagtgcctggcacatagaaagctctcagtaggcattttgttatacttataatgtgttaccaaaaaatatttatacaaatctgaatgtatcatgctctttggaagcgaatatcggaattttaaatatcagaatttttatttcttttataatatatttataaagcaagaataatcatatatttatagaaaaagatacaaccgtattcagaatactgtattttatgtttttttctcattggtgatataatttattttcttaaaatagccatgctggctggagccacagcagtttactcccagttcattactcagctaacagacgaaaaccagtcatgttgccccgtttgtcagagagtttttcagacagaggctgagttacaagaagtcatcagtgatttgcagtctaaactgcgacttgctccagataaactcaagtcaacagaatcagagctaaaaaaaaaggaaaagcggcgtgatgaaatgctgggacttgtgcccatgaggtaagaatgggatttaccttcactgtacatgtagcagcacattgtaaaaggtacccatctcatgcctgggcagatggtagttactcagtaaggactctgagctggtatgccctgtcttatatcacttctatgataagaagattcaattattttgtttaaagataagcttgtttcctgtctttttttctttttcttttttttttctgagacagagtctctctctgtcacctaagctggagtgcagtggcatgatcttggctcattgcaacctccacctcccagaagcgattcccatgcctcagcctcttcagtagctgggattacaggcatgtaccaccacgcccagctaatttttgtaatttttagtagagatggagtttcaccatgttggccaggctaatctcgagctcctggcctcaaagtgattggcccacctcggcctcccaaagtgctgggatcacaggtgtgagcaccgtgcatagccagtaagcttatttctt

SEQ ID NO: 616 - DNA, 1190 bp, Homo sapiens
ggatcccacgtagcatctagttgttatttctccttaggctcctgcagtctgtaacaatctgtctttatctttcatgaccttaacacttttggtcaatatgaccagttcattagtagaatatttctcagtttgacaaacaccacagtaataattattgcaagcaagatctgtcagtggatactaaaatcagtaggcagaaagttgagaagcaagatatttacatagtctcaacatttctctcctaagatacttgttaattacaaagactaaaacagtaactttacagtggagaaacctggccaacaccatctaagccaagtgaataaggattaacatcatcagtaataagacatattgatatcatgattccatatccactgatatgataccctgaaaagaacacaatgtcacttctgtggtattcttcctaaaaatacataacctcagtctaactgtgagaaacatcagatactttatttttaattgtgttttctatttaggcaaagcataattgatttgaaggagaaggaaataccagaattaagaaacaaactgcagaatgtcaatagagacatacagcgcctaaagaacgacatagaagaacaagaaacactcttgggtacaataatgcctgaagaagaaagtgccaaagtatgcctgacagatgttacaattatggagaggttccaggtaagtttattgtagtttaaggcagaataaaacttgttccatggtggcttgaatttgaagtgtgagagttaaaaatagtagctagtattcaggtacaggttgtgtttagaattccccatcctgaatttcagataccctcagggagaaactgcttagtttacatccctgggtttaaactttttaattcataaatttaaaaattaagacagttctgtttgtttttcatctttagtcagcttccttttgtttacatcatttgaattgctgataattaatttcacttttatcctattaaactttgctaaaattgtatctagaaatggtttataagtttagatttaaaaaataaatgataagagcaattaatttttaaagattttgaataatgcagtaagtttattaaaggaaatcattttgttatattcttaagatggaacttaaagatgttgaaagaaaaattgcacaacaagcagctaagctacaaggaatagacttagatc

SEQ ID NO: 617 - DNA, 1127 bp, Homo sapiens
tacaataatgcctgaagaagaaagtgccaaagtatgcctgacagatgttacaattatggagaggttccaggtaagtttattgtagtttaaggcagaataaaacttgttccatggtggcttgaatttgaagtgtgagagttaaaaatagtagctagtattcaggtacaggttgtgtttagaattccccatcctgaatttcagataccctcagggagaaactgcttagtttacatccctgggtttaaactttttaattcataaatttaaaaattaagacagttctgtttgtttttcatctttagtcagcttccttttgtttacatcatttgaattgctgataattaatttcacttttatcctattaaactttgctaaaattgtatctagaaatggtttataagtttagatttaaaaaataaatgataagagcaattaatttttaaagattttgaataatgcagtaagtttattaaaggaaatcattttgttatattcttaagatggaacttaaagatgttgaaagaaaaattgcacaacaagcagctaagctacaaggaatagacttagatcgaactgtccaacaagtcaaccaggagaaacaagagaaacagcacaagttagacacaggtaatacagtctgtgtccttctgtactcatagagactttgacattgcgagcacatgccttttacagtcaattttatatctgttacatggacaacgaagttccttcctgtccacatatatttgctctttttttctgaaaagcatcacttctctttgttctcttactttgcacaacagattttgaacagtaggagagtatgaaataagctgtattctcttttccttttttttttttttaagatagagtttcacttttgtcgcccaggctggagtgcaatggtgcaatcttggctcactgcaacctccgcctcccgggttcaagtgattctcctgcctcaccctcctgagtagctggggttacaggcacacatcactatgcccagctaatttttgtattttttcgtagagatggggtttcactgtgtttgtcaggctgatctcgaactcctgacctcaggtgatccacctgcctcagtctcccaaagtgctgggattacaagt

SEQ ID NO: 618 - DNA, 1194 bp, Homo sapiens
cccaggctggagtgcaatggtgcaatcttggctcactgcaacctccgcctcccgggttcaagtgattctcctgcctcaccctcctgagtagctggggttacaggcacacatcactatgcccagctaatttttgtattttttcgtagagatggggtttcactgtgtttgtcaggctgatctcgaactcctgacctcaggtgatccacctgcctcagtctcccaaagtgctgggattacaagtgtgagccagtgcgcctggccatgagctgtattctttctcattcatacctgccctgtaagctttccctgtgagtggccagcagggaacatcaagctgatttgagaactagcagggttctcattgtatttttgttgcagtgggtggggcccacagaaatagcatttgtggattccatagaccgataaaaatgggaagaatgatacaaatagtattttctatgcccttacattaattactgtgataatatgtttttgtgtagtttctagtaagattgaattgaatcgtaagcttatacaggaccagcaggaacagattcaacatctaaaaagtacaacaaatgagctaaaatctgagaaacttcagatatccactaatttgcaacgtcgtcagcaactggaggagcagactgtggaattatccactgaagttcagtctttgtacagagagataaaggtaagaatatccatacatgttttttgtaaaattattttaattatttatttttatttttattttttgagacagtctcgttctgtcacccaggctggagtgcagtagcacgatctcggctcactgcaacctccatctcctgggttcaagtgattctcttgcctcagcctctggagtagctgggattacaggcgtgcaccaccatgcctggctaatttttgttcttttagtagagacgggttttcgccattggacaagctggtttcaaactcctgaactaaggtgatccgcctaccttggcctcccaaagtgctgggattacaggcgtgagccagcatgccccgccccattcttctcttttagagacagagtcttcatcagtcttccaagctggaatgcagtggtacagtcacagctcactcactgcagcctcgacctcctgagctcaagcaatcctcctgcctcagcctctcaagtagatgggactacaggcacacaccacc

SEQ ID NO: 619 - DNA, 1111 bp, Homo sapiens
gctaagcttaaggacagaagtgtttttaccatcatgttttcatctgaaaaagaaaagtctggactgaatgagctttcctattctttgatcatgcagcagtgacgggcacctataaaatcatgaaaactcatgcttgaagccacacgctaatataattgggagcacatggcctagattaagaatcaaattagtggttgatgcagtatagcatgcgtagtggttaagagcgtgaactctggagctggactgggttaaaatcttggctgcttcatttactggctgttgtgaccctggacaaatcattctctgtgtctgtttgctcgtttgaaatataggactgaaaatgatggtactgtcctcatagggtcattgaaaggagcaaatgagttgacttttagagcctggcacatagaaagtgcttttattaagactgtgaagtctgacccctaaagtaagataatggaatattatataatactttatcttttttatatttttaggatgctaaagagcaggtaagccctttggaaacaacattggaaaagttccagcaagaaaaagaagaattaatcaacaaaaaaaatacaagcaacaaaatagcacaggataaagtaagatttcatttatatatttacttatcaaatatctgtattaaacttatgttcatagcaccacgtcggacacttatttcacatgaaattaaatagcataagataaatagtattttcagattcatggtataattttgacattagaaattcttgttagaacaaggatttgatgtaaattattttgctgcttgatctacaatagaagttaagaaatgagactaattaatcaattcctataggtgagaaagggacttgtctgcgatcataaaattcagtagtggtggaaactggaacccaatgttcataacttcccagccagtgttttactgtgctctcctgttatgtgcccttaagtacaaccagtgtaaatttaatgaatatttttctacagctgaatgatattaaagagaaggttaaaaatattcatggctatatgaaagacattgagaattatattcaagatgggaaagacgactataagaaggtaatttaaaacttaa

SEQ ID NO: 620 - DNA, 1093 bp, Homo sapiens
tgctaaagagcaggtaagccctttggaaacaacattggaaaagttccagcaagaaaaagaagaattaatcaacaaaaaaaatacaagcaacaaaatagcacaggataaagtaagatttcatttatatatttacttatcaaatatctgtattaaacttatgttcatagcaccacgtcggacacttatttcacatgaaattaaatagcataagataaatagtattttcagattcatggtataattttgacattagaaattcttgttagaacaaggatttgatgtaaattattttgctgcttgatctacaatagaagttaagaaatgagactaattaatcaattcctataggtgagaaagggacttgtctgcgatcataaaattcagtagtggtggaaactggaacccaatgttcataacttcccagccagtgttttactgtgctctcctgttatgtgcccttaagtacaaccagtgtaaatttaatgaatatttttctacagctgaatgatattaaagagaaggttaaaaatattcatggctatatgaaagacattgagaattatattcaagatgggaaagacgactataagaaggtaatttaaaacttaaaattatttatttgattgtatttttattcatgtgcttaaagaattttcttttttgtagcaaaaagaaactgaacttaataaagtaatagctcaactaagtgaatgcgagaaacacaaagaaaagataaatgaagatatgagactcatgagacaagatattgatacacagaaggtaggtctgttttgcttatgatatcacttacacctatgacattcttttctatagttttattttcaatagaagatccattgaatagaaatgcaaaaaggaaagaggccaagcgtggtggctcacacctgtaatccctgcactttggaaggccgaggcgggtggatcacttgaggccaggagatcaagaccagcctggccaacacagtgaaaccctgtctgtactgaaaatacaaaaattagctggccgtggcggcgcgcacctgtagtcccagctactcgggaagctgaggcatgagaatcacctgaacctggg

SEQ ID NO: 621 - DNA, 1114 bp, Homo sapiens
gcaccacgtcggacacttatttcacatgaaattaaatagcataagataaatagtattttcagattcatggtataattttgacattagaaattcttgttagaacaaggatttgatgtaaattattttgctgcttgatctacaatagaagttaagaaatgagactaattaatcaattcctataggtgagaaagggacttgtctgcgatcataaaattcagtagtggtggaaactggaacccaatgttcataacttcccagccagtgttttactgtgctctcctgttatgtgcccttaagtacaaccagtgtaaatttaatgaatatttttctacagctgaatgatattaaagagaaggttaaaaatattcatggctatatgaaagacattgagaattatattcaagatgggaaagacgactataagaaggtaatttaaaacttaaaattatttatttgattgtatttttattcatgtgcttaaagaattttcttttttgtagcaaaaagaaactgaacttaataaagtaatagctcaactaagtgaatgcgagaaacacaaagaaaagataaatgaagatatgagactcatgagacaagatattgatacacagaaggtaggtctgttttgcttatgatatcacttacacctatgacattcttttctatagttttattttcaatagaagatccattgaatagaaatgcaaaaaggaaagaggccaagcgtggtggctcacacctgtaatccctgcactttggaaggccgaggcgggtggatcacttgaggccaggagatcaagaccagcctggccaacacagtgaaaccctgtctgtactgaaaatacaaaaattagctggccgtggcggcgcgcacctgtagtcccagctactcgggaagctgaggcatgagaatcacctgaacctgggaggcagaggttgcagtgagctgtgattgtaccactgcactctagcctgggcgacacagcgagactctgtctctaaaaagaaatgcaaaaagtaaagaaaaataattccaataacattcttacttcatttattttttatttttattttcagtaaaagactcatggtaaaagttcgaacataaaggcat

SEQ ID NO: 622 - DNA, 1128 bp, Homo sapiens
aaaagttggggaagacttcagtagtagtattgatctcttataatctttcaggtcagtaggctttatcatggggttcctatgcaaaatgatccactggggatgtaggtattaaaatatctagttatatttttaatttcaccatttaaaatgtctgttttgtatgtttttaatactttataagtaaataagtacacagatatatgctcaaatctttatgagactccccatcaaacagtagacctggtttttagattatggttgtgaaagagcagtaaaagctgcgctacaggaggtattacacttgtcactgtggatggggatgggccatccagattgccccagacctgtagattccttcacactggcttattctccctctgttgaatttcacatgattctaagtaagacagaaatggcacttgctgtcaccagttgcctgttacagatttcatgttagtaacttggttatttttgttaactaatttaatgtttacctttagatacaagaaaggtggctacaagataaccttactttaagaaaaagaaatgaggaactaaaagaagttgaagaagaaagaaaacaacatttgaaggaaatgggtcaaatgcaggttttgcaaatgaaaaggtatgcttttaaaataatcttcagtttaaataaacgtctttattactggaatgtgaagaatattaaatacctgttttaaaagaattttagcctcagcctggtatcctttgagagttactagaaggtgaacagtgttttgatacaattatatttcatggccttaagaactttattactgaagaagtgatatagaattggtaatcacactgtagtgatgggccttagttattcagtattgaacatgcttagcccccatacatctgctagcctgctgcacagaatagtggtactaagcataaagaatatggagctgtggaccttgtctgggtcagagcttgtacagtctataatattgtcaatggagttgttgccagagtgatttatccacagagattcattttagattttctcatttgtaattatgtgtccaccagagcatttcttttgaaagatgagcctcattcttcctttatctggtcttattgttacttattgtagtt

SEQ ID NO: 623 - DNA, 1225 bp, Homo sapiens
caagagaaattttgttttcatggaggaatctaaatttttaataagtattactgcagaaaattaatatatgatttaattcgtattgtgcctttgacatgagcaaaatgatgatgaagcctgttatccataacttcttagtgttgataattgtgcattctcagttcacaatcagaagattgtgaatttgtaatattaatcaccagagtgctttacttagcgtctaaaggccaggaactttatcagtgatcacatgctatgagggttctgtaatacacaaaattagctatttagcaacctatgtgcggcagagatatggaaggaagagaggggttttctttagtaccaaagccctaaataataagcaaggagagactctgttataatatactgattgctaaggagaatgatacttaacctatctaaagaaatctatgacttttccacttcaggttgttaaaagctaaaaaatggtcctcatttgtcatttttcttttttacagtgaacatcagaagttggaagagaacatagacaatataaaaagaaatcataatttggcattagggcgacagaaaggttatgaagaagaaattattcattttaagaaagaacttcgagaaccacaatttcgggatgctgaggaaaagtatagagaaatgatgattgttatgaggacaacagaacttgtgaacaaggatctggatatttattataagactcttgaccagtaagtattagactggggattttcttattgcagttaatattaactaacatactttagtcatcttttctctcatttttttctttttttcttttttattttttgagacagagtttcactcttgtttcccaggctggagtgcaatggcacgatctcagctcactgcaacctctgcctcccgggttcaaatgattctcctgcctcatcctcccaagtagctggtattacaggtgcatgccaccacgctgggctaatcttgtatttttagtagagacggggtttctccatgtaggtcaggctggtctcgaactcctgacctgaggtgatccacccgcctcggcctcccaaagtgctgggattacaggcatgagccactgcgcccagcccctcattttttctctttaaatatggtattttatgtataccatggattggaaaatatatgtatgtatgtatgtaaacacacactagcttaagttatgaagttaagatataaagcatat

SEQ ID NO: 624 - DNA, 1086 bp, Homo sapiens
gacaaggtggcagttcgattctcctattttccccatagactgcaggccccttggctaaccgtaaaccttctaccctttaactccctgtcgtccattcagcaggccttcctgtgacccgtgagtatcagtggaagcattccctccaataagttaccacggcctaagaaaaaagtctaaaaaattatgtttcctgaagttttcacagtatttaagtatttacgtaaaggagtatttgttgtatcctagagagtgaatatggagaagggtacccctggagcactagaaataagcctgccaattttcagtattagccaagcagcaaagttttgctgctgtttatttttgtagctcttactatattctacttttaccattgaaaatattgaggaagttatttatatttctattttttatatattatatattttatgtattttaatattactattacacataattattttttatatatatgaagtaccaatgacttccttttccagagcaataatgaaatttcacagtatgaaaatggaagaaatcaataaaattatacgtgacctgtggcgaagtacctatcgtggacaaggtgagtaccatggtgtatcacaaatgctctttccaaagccctctccgcagctcttccccttatgacctctcatcatgccagcattacctccctggacccctttctaagcatgtctttgagattttctaagaattcttatcttggcaacatcttgtagcaagaaaatgtaaagttttctgttccagagcctaacaggacttacatatttgactgcagtaggcattatatttagctgatgacataataggttctgtcatagtgtagatagggataagccaaaatgcaataagaaaaaccatccagaggaaactcttttttttttctttttcttttttttttttccagatggagtctcgcacttctctgtcacccgggctggagcgcagtggtgcaatcttggctcactgcaacctccacctcctgggttcaggtgattctcccacctcagcctcccgagtagtagctggaattacaggtgcgcgctcccacacctggctaat

SEQ ID NO: 625 - DNA, 1143 bp, Homo sapiens
gcgcagtggtgcaatcttggctcactgcaacctccacctcctgggttcaggtgattctcccacctcagcctcccgagtagtagctggaattacaggtgcgcgctcccacacctggctaattttttgtattcttagtagagatggggtttcaccatgttggccaggctggtctcaaactcctgccctcaggtgatctgcccaccttggcctcccagtgttgggtttacaggcgtgagccaccgcgcctggcctggaggaaactcttaacagggaaactaagaaagagttgaggctgaggaactggggcatctgggttgcttctggccagaccaccaggctcttgaatcctcccagccagagaaagagtttccacaccagccattgttttcctctggtaatgtcagcctcatctgttgttcctaggcttacttgatatgtttgtaaatgacaaaaggctacagagcataggttcctctaaaatattcttcttcctgtgtcagatattgaatacatagaaatacggtctgatgccgatgaaaatgtatcagcttctgataaaaggcggaattataactaccgagtggtgatgctgaagggagacacagccttggatatgcgaggacgatgcagtgctggacaaaaggcaggtatctcaaaagcctggggagccaactcacccaagtaactgaaagagagaaacaaacatcagtgcagtggaagcacccaaggctacacctgaatggtgggaagctctttgctgctatataaaatgaatcaggctcagctactattattacactctcctgaagctaaccaacatttcctgcaacattatgtagacttttaaaagaagggcctgaagcattctcacaggataggctaaatgtagaacaagaagctgaagacccgttagagttttcatggcactccttatcagaataaggtcactgtctcatcagttataagacataccactattttatgtgccagcaggaatgaaaaaatgcaattataaccataagatgtttcagaatcaatgacataatagtattgcaaaccagattctagcttaagctagaatgaatattccagtatagtaaggagtctcattaagaaagtagcccctcatagaactaagtccct

SEQ ID NO: 626 - DNA, 1134 bp, Homo sapiens
cttttttattctctcagtctcaggattatacacaagaatatggaaatttaaaggtagcagagaaaaagtgagaggctctagaaaacgtgtcgaagttttctaacagatcccattatcaggcaaatagccaggtcaagaatttttaaggttgctcatcttacaggattattaaaattacagataaatggcattgtctctgtttctagcctttggtctcaagttggttgtagctgatgtaattttttatgtgagagcatcagcgttgttctgagcattttgttttgtggtgaatgataggctgagatcatgcaggttctccttctggaggacataagaatctggtcccagtgctgggctctcccagagggcagtgctttacctaacagtgaacctgtgacgtttcccacttttccctgctgaaaagatcatgtcaggactgcttgcctgccatgagatgagaaggtctgtgctgggcttctcacataggggcttttttccaggtattagcctcactcatcattcgcctggccctggctgaaacgttctgcctcaactgtggcatcattgccttggatgagccaacaacaaatcttgaccgagaaaacattgaatctcttgcacatgctctggttgagtaagtatctcttgcacatgctctggttgagtaagtatctcacatttggggacaggttgtgatagttcttcaaaaccaagagagttctgtgatgaaaacgttctctagctgtgttccccacttcttggggaagccagttggtgccaggccctgggctttaccttttgatagtaattcttcagatccctcctaaaggaactagatggtgaacagcagccccagacacatcctgcagctccccaagtgtgttcacagggagagagtcactgtgaggggttcctggcctggttttcctgtaaacctaccagaggaacccacatgtcatgcacagcaattagcatgccctgctaagacatctgcaggtagtggtagtgggtttaggactgtctccccagctttccacatgtgtcagagaactgtgaggaatgacagagctcttactcaaaaagcttatttgagattaggtaaagtccagtgagggtaaaattgcacacctttta

SEQ ID NO: 627 - DNA, 3444 bp, Homo sapiens
ctagtgactggtggtggcagaattctaagtagacccagctcttaagaaagcagtgttattccccttacctgtagtttgtctttattacttttaaatttttcttccagagaaaagtagtaacaggtcaggaaaatcccaggcgaaggagtaagccttctatagttgaacagtttggatattaaggaaaactcaataaaatatttatacctgctttagtgagaacttctgatctggaagaaactagttcttgtattcctgtgagtccctaagccagacctaagtgaggagtcaggccatgtgtccctactgtctggagaggagaagagactcctgcctggctggcctgaaggcctggggccacccctccacttcctgcagggtagctggggccctgacacacagcacaagttcatgtgtctgacaaggtttgcggtgacttttcaaatcaaagaaggggttatgctctttactaataatatgttctgaatatattgttgcaggataataaaaagtcgctcacagcagcgtaacttccagcttctggtaatcactcatgatgaagattttgtggagcttttaggacgttctgaatatgtggagaaattctacaggattaaaaagaacatcgatcagtgctcagagattgtgaaatgcagtgttagctccctgggattcaatgttcattaaaaatatccaagatttaaatgccatagaaatgtaggtcctcagaaagtgtataataagaaacttatttctcatatcaacttagtcaataagaaaatatattctttcaaaggaacattgtgtctaggattttggatgttgagaggttctaaaatcatgaaacttgtttcactgaaaattggacagattgcctgtttctgatttgctgctcttcatcccattccaggcagcctctgtcaggccttcagggttcagcagtacagccgagactcgactctgtgcctccctccccagtgcaaatgcatgcttcttctcaaagcactgttgagaaggagataattactgccttgaaaatttatggttttggtatttttttaaatcatagttaaatgttacctctgaatttacttccttgcatgtggtttgaaaaactgagtattaatatctgaggatgaccagaaatggtgagatgtatgtttggctctgcttttaactttataaatccagtgacctctctctctgggacttggtttccccaactaaaatttgaagtagttgaatggggtctcaaagtttgacaggaaccttaagtaatcatctaagtcagtacccaccaccttcttctcctacatatcccttccagatggtcatccagactcagagctctctctacagagaggaaattctccactgtgcacacccacctttggaaagctctgaccacttgaggcctgatctgcccatcgtgaagaagcctgtaacactcctctgcgtctatcctgtgtagcatactggcttcaccatcaatcctgattcctctctaagtgggcattgccatgtggaaggcaagccaggctcactcacagagtcaaggcctgctccctgtagggtccaaccagacctggaagaacaggcctctccatttgctcttcagatgccacttctaagaaaagcctaatcacagtttttcctggaattgccagctgacatcttgaatccttccattccacacagaatgcaaccaagtcacacgcttttgaattatgctttgtagagttttgtcattcagagtcagccaggaccataccgggtcttgattcagtcacatggcatggttttgtgccatctgtagctataatgagcatgtttgcctagacagcttttctcaactgggtccagaagagaattaagccctaaggtcctaaggcatctatctgtgctaggttaaatggttggcccccaaagatagacaggtcctgatttctagaacccgtgactgttactttatacagcaaaggaaactttgcagatgtgattaaagctaaggaccttaagacagagtatcctgggggtggtggtggggtgggggggggtcctaaatgtaatcacgagtaagattaagagcaaatcaattctagtcatatattaaacatccacaataaccaagatatttttatcccaagaatgcaagatttcagaaaatgaaaaatctgttgataaatccatcactataataaaaccgaaggtgaaaaaaattctgaaaaaattctagcagctatatttgataaaattcaacatctcctagctttagcaaactcacagttttgcaaataatattttcttaatgttatctgttgctaaatcaaaattaaacagtcatcttaactgcaaaataaaacatttctcagtaaatattaaagccagttaccttctatcaacatgttaatgaaagtgctagttgttgcagcaaagaataacaaaggcaatacacgatcaatataggcagtgaaacaaaagtatcatttgcaagttaaaacagacttcccaattttaaatctggtttccccctgaatatgtggcatccttggcagcacttctgagagtggctgctttcattccaagaagcccatgggtttggaggtgggataggtgcctttctggcttctcattgctgcttctagatcagtctccaaatatcccccttccccacattggaatgaatagccatcacagcatggatggaggttagaatgagccagactgcctgggctcaaatcctagcacaccactcactagctggggaccttgagcaagttatttgtcctgttttctgtttccttatatgtaaaagtgggtaaaatggtacatattttgtagggttgttatgaagattgaatgacattatttacaaactgcttagaactgcttgccacctactaaatactgtgtaagtgttcaagaaaaagctgtcttcatttcactcttgttgcagttatctttcattcccagcttggtcactccctcttatttgttgaagagtttagctcccggttcagtgtcaccccattactaataatcattgctgatttcaatatccaagtgatggtctaatacaactccttggcctctcagtcttttttattttttgaggtggagtcttgctctgtcacccaggctggagtgcaatggcaccatctcagctcactgcaacctctgcctccctgatacaagcaatcctcctgcctcagcctcccaagtagctaggattacaggcatgtaccaccacaccaggctaatttttgtattttagtagagacagggtttcgccttgttggccaggctggtcttgaacgtctggcctcaagtgatctgcctaccttggcctccctcagcccctttttgtttcctccagtgagaagatactcagttctatggtcttattctagagccccgtccttttaataacaataactgcacccc

SEQ ID NO: 628 - DNA, 1500 bp, Homo sapiens
aggcaatacacgatcaatataggcagtgaaacaaaagtatcatttgcaagttaaaacagacttcccaattttaaatctggtttccccctgaatatgtggcatccttggcagcacttctgagagtggctgctttcattccaagaagcccatgggtttggaggtgggataggtgcctttctggcttctcattgctgcttctagatcagtctccaaatatcccccttccccacattggaatgaatagccatcacagcatggatggaggttagaatgagccagactgcctgggctcaaatcctagcacaccactcactagctggggaccttgagcaagttatttgtcctgttttctgtttccttatatgtaaaagtgggtaaaatggtacatattttgtagggttgttatgaagattgaatgacattatttacaaactgcttagaactgcttgccacctactaaatactgtgtaagtgttcaagaaaaagctgtcttcatttcactcttgttgcagttatctttcattcccagcttggtcactccctcttatttgttgaagagtttagctcccggttcagtgtcaccccattactaataatcattgctgatttcaatatccaagtgatggtctaatacaactccttggcctctcagtcttttttattttttgaggtggagtcttgctctgtcacccaggctggagtgcaatggcaccatctcagctcactgcaacctctgcctccctgatacaagcaatcctcctgcctcagcctcccaagtagctaggattacaggcatgtaccaccacaccaggctaatttttgtattttagtagagacagggtttcgccttgttggccaggctggtcttgaacgtctggcctcaagtgatctgcctaccttggcctccctcagcccctttttgtttcctccagtgagaagatactcagttctatggtcttattctagagccccgtccttttaataacaataactgcacccctccaaaatctcagttttaagcatctcactctccaataaccccatggtgtctacaattttcctgtggtcctcaaccccagcaattctttgaccccactgagatttcaatccattgattctatggctttttcacaggttgtttccctgatgcctgtacttctctccttattcaacttaaattccatggctcatcattatgtcaccctccactgcattgtactcaaactgtcccgacaatccccagccctactggaatccagctctgcctcctccctgcaacacctgcacatcccgtttcctttgctgtttcctcctcatttccctggcccctcaatgtcacaggttttagtactcagagtctgcacctcttttcttctctgtgctcacttatttggtgatctcatccagtctcatagctttaaattatcttagtttgggttctcccagaagcagagcgtaaaacaatgcttcacgtgaaagtaatcagtaggaaattgggga

SEQ ID NO: 629 - DNA, 1281 bp, Homo sapiens
gtgcggagtttggctgctccggggttagcaggtgagcctgcgatgcgcgggaagacgttccgctttgaaatgcagcgggatttggtgagtttcccgctgtctccagcggtgcgggtgaagctggtgtctgcggggttccagactgctgaggaactcctagaggtgaaaccctccgagcttagcaaagaagttgggatatctaaagcagaagccttagaaactctgcaaattatcagaagagaatgtctcacaaataaaccaagatatgctggtacatctgagtcacacaagaagtgtacagcactggaacttcttgagcaggagcatacccagggcttcataatcaccttctgttcagcactagatgatattcttgggggtggagtgcccttaatgaaaacaacagaaatttgtggtgcaccaggtgttggaaaaacacaattatgtatgcagttggcagtagatgtgcagataccagaatgttttggaggagtggcaggtgaagcagtttttattgatacagagggaagttttatggttgatagagtggtagaccttgctactgcctgcattcagcaccttcagcttatagcagaaaaacacaagggagaggaacaccgaaaagctttggaggatttcactcttgataatattctttctcatatttattattttcgctgtcgtgactacacagagttactggcacaagtttatcttcttccagatttcctttcagaacactcaaaggttcgactagtgatagtggatggtattgcttttccatttcgtcatgacctagatgacctgtctcttcgtactcggttattaaatggcctagcccagcaaatgatcagccttgcaaataatcacagattagctgtaattttaaccaatcagatgacaacaaagattgatagaaatcaggccttgcttgttcctgcattaggggaaagttggggacatgctgctacaatacggctaatctttcattgggaccgaaagcaaaggttggcaacattgtacaagtcacccagccagaaggaatgcacagtactgtttcaaatcaaacctcagggatttagagatactgttgttacttctgcatgttcattgcaaacagaaggttccttgagcacccggaaacggtcacgagacccagaggaagaattataacccagaaacaaatctcaaagtgtacaaatttattgatgttgtgaaatcaatgtgtacaagtggacttgttaccttaaagtataaataaacacactatggcatgaatga

SEQ ID NO: 630 - DNA, 592 bp, Homo sapiens
gtgcggagtttggctgctccggggttagcaggtgagcctgcgatgcgcgggaagacgttccgctttgaaatgcagcgggatttggtgagtttcccgctgtctccagcggtgcgggtgaagctggtgtctgcggggttccagactgctgaggaactcctagaggtgaaaccctccgagcttagcaaagaagttgggatatctaaagcagaagccttagaaactctgcaaattatcagaagagaatgtctcacaaataaaccaagatatgctggtacatctgagtcacacaagaagtgtacagcactggaacttcttgagcaggagcatacccagggcttcataatcaccttctgttcagcactagatgatattcttgggggtggagtgcccttaatgaaaacaacagaaatttgtggtgcaccaggtgttggaaaaacacaattatggtaaaataaagtgttctccttttaagggtgggtttaataacatattatgaaagtagtattttgtactatcgtcaggaaaccaaataagatatatatgtgctcttaattttaagtgtgtatgtgcattaaacaaaaattagcttaca

SEQ ID NO: 631 - DNA, 1500 bp, Homo sapiens
ggttgcagtgagccgacatcgtgccactgcactccatcatgggcaacacagtgagactctgtctcaaaaaaaaaaaaaaaaaaatcgccaataggtagggaataagttaccccctgctaaataagttacactcacctaggcaaggaaggaactcataaaccaccttctaaactgcttgccttcctccccgaagttctgtaatttagaggcggtcactaccactgcttgaacaccccttcccaagtctgtaccacaaaaggagctcttgtgtagcccagcccctccttctcaggaccccaggagcccagacacactaatggggacattagttgcttacttttccagctactgcttaagctaggcaggccatgaagaaataacggtctcagtaacctccatgctcgggatacgactcccgggaagacgtgggtgggtgcggggaatgcggactgatccctcccagcggccgttgggggctggcccacaatccctcgcgagggcgggaaaagcaatgtggtcgttgcggggggggggggtcagaaaagggggacggtcagcgggaagagccaagagactgcaactctacaaagagcacgcagattaattctaatgattgttccctgagcttttcacaccaaaataatggtaactggctagtgtgtgcccgttacgctcactactcccactcgagatcattcctattaatgactctgaggcttcacctaacaggccacggtggaggcaaggaaatgtggcgtggagaacccactgggcctggctctccgtcctatggtctccgtccatcgttttacagtcagggtgtacatttgatgaggaatctctaaatgggattttggggaatcaaaacggaatggtgcataagtgtgaaaatttacaagactgcgcaaagctgcaaggcccggagccccgtgcggccaggccgcagagccggccccttccgctttacgtctgacgtcacgccgcacgccccagcgagggcgtgcggagtttggctgctccggggttagcaggtgagcctgcgatgcgcgggaagacgttccgctttgaaatgcagcgggatttggtgagtttcccgctgtctccagcggtgcgggtgaagctggtgtctgcggggttccagactgctgaggaactcctagaggtgaaaccctccgagcttagcaaaggtaacgactcctgatggcaagctgaggcacaccggccgccgtcagcgccgcctcagtcttcgttctctcgcctcggccttcagcccagtctccgttagattctgcttcctcccacgtccatgtttacagcgtgaaagagctcctcgactccacttacaagttgtctgaatggttaggagaactgtggtcgtgaaaacatttactaattgcttttcctctggcaatgcctgctgaatgctttgaggattgtctcatttaaccctcaacccgcttacgtagattattatattcagtatatggatgagagaactga

SEQ ID NO: 632 - DNA, 1187 bp, Homo sapiens
cgggaaaagcaatgtggtcgttgcggggggggggggtcagaaaagggggacggtcagcgggaagagccaagagactgcaactctacaaagagcacgcagattaattctaatgattgttccctgagcttttcacaccaaaataatggtaactggctagtgtgtgcccgttacgctcactactcccactcgagatcattcctattaatgactctgaggcttcacctaacaggccacggtggaggcaaggaaatgtggcgtggagaacccactgggcctggctctccgtcctatggtctccgtccatcgttttacagtcagggtgtacatttgatgaggaatctctaaatgggattttggggaatcaaaacggaatggtgcataagtgtgaaaatttacaagactgcgcaaagctgcaaggcccggagccccgtgcggccaggccgcagagccggccccttccgctttacgtctgacgtcacgccgcacgccccagcgagggcgtgcggagtttggctgctccggggttagcaggtgagcctgcgatgcgcgggaagacgttccgctttgaaatgcagcgggatttggtgagtttcccgctgtctccagcggtgcgggtgaagctggtgtctgcggggttccagactgctgaggaactcctagaggtgaaaccctccgagcttagcaaaggtaacgactcctgatggcaagctgaggcacaccggccgccgtcagcgccgcctcagtcttcgttctctcgcctcggccttcagcccagtctccgttagattctgcttcctcccacgtccatgtttacagcgtgaaagagctcctcgactccacttacaagttgtctgaatggttaggagaactgtggtcgtgaaaacatttactaattgcttttcctctggcaatgcctgctgaatgctttgaggattgtctcatttaaccctcaacccgcttacgtagattattatattcagtatatggatgagagaactgatatcttggggagcttaggtaacttttcatgctaactgggttaggaaatactggagtcagaattggttgtctaatttttgctgttccaagatccaaggggtaagggttaaatttcagaaatgcaggattttgtgtaggactagagacactaagaatgagaaagagagtagaatccccggaatcttgag

SEQ ID NO: 633 - DNA, 1404 bp, Homo sapiens
taattctttatgtgatgactaagaaaacgaatacctttattaagctgaatttttttttttttttttttgagacggagtctcgcactgtcatccaggctggaatgcagtggtgcgatccaggctggagtgcagtggtgcaggttcaagtgattgtcctgcctcagcctcccaagtagctggaattataacgcgtgccaccatgcccggctaatttttgtatttttagtagagacggagtttcaccatgttggccaggctggtcttcaactcctgacctcaggtgatctggctgcctcagcctcccaaagtactgggattttaggcatgagccactgtgtccggccaaactgaaaaattaaatggttgatagaatgttgcatttttatgtttctccactcctagcatcactgttgtctacaaattaataaagacaatcgattatcatgttacacttttaaatctctaaaattagggttctttttttcttattttactttcagaagttgggatatctaaagcagaagccttagaaactctgcaaattatcagaagagaatgtctcacaaataaaccaagatatgctggtacatctgagtcacacaagaagtgtacagcactggaacttcttgagcaggagcatacccagggcttcataatcaccttctgttcagcactagatgatattcttgggggtggagtgcccttaatgaaaacaacagaaatttgtggtgcaccaggtgttggaaaaacacaattatggtaaaataaagtgttctccttttaagggtgggtttaataacatattatgaaagtagtattttgtactatcgtcaggaaaccaaataagatatatatgtgctcttaattttaagtgtgtatgtgcattaaacaaaaattagcttactatttgtgttacttcattatcccttcttgataaatgtatgcaattattctgatgtgaaaaagtgtttcttttgcaaattgtactgcagtcataaggttaaacaggaagtttctgcgttattcattcctgagactatatttgaaagtcagatgtttgaaagtagatttatggctaggggtagtggctcatgcctataatcccagcactttgggaggccgaggcaggaggattgcttgagcccaggagtttgaggcctgcctgggcaacatagtgagacctcgtctctactaaaaatggaaaattagctgagtgtggtggcacatgcctgtggtcctagctacttgggaggctgaggcaggaggatagcttgagccggggaggtcaaaactgcagtgagccttaatcacatcactgggcagcagagtgagaccctatctcaaaaaaaaaagaggccggggatggtggctcacacctgtaatcccagcactttgggaggctga

SEQ ID NO: 634 - DNA, 1500 bp, Homo sapiens
tcactgttgtctacaaattaataaagacaatcgattatcatgttacacttttaaatctctaaaattagggttctttttttcttattttactttcagaagttgggatatctaaagcagaagccttagaaactctgcaaattatcagaagagaatgtctcacaaataaaccaagatatgctggtacatctgagtcacacaagaagtgtacagcactggaacttcttgagcaggagcatacccagggcttcataatcaccttctgttcagcactagatgatattcttgggggtggagtgcccttaatgaaaacaacagaaatttgtggtgcaccaggtgttggaaaaacacaattatggtaaaataaagtgttctccttttaagggtgggtttaataacatattatgaaagtagtattttgtactatcgtcaggaaaccaaataagatatatatgtgctcttaattttaagtgtgtatgtgcattaaacaaaaattagcttactatttgtgttacttcattatcccttcttgataaatgtatgcaattattctgatgtgaaaaagtgtttcttttgcaaattgtactgcagtcataaggttaaacaggaagtttctgcgttattcattcctgagactatatttgaaagtcagatgtttgaaagtagatttatggctaggggtagtggctcatgcctataatcccagcactttgggaggccgaggcaggaggattgcttgagcccaggagtttgaggcctgcctgggcaacatagtgagacctcgtctctactaaaaatggaaaattagctgagtgtggtggcacatgcctgtggtcctagctacttgggaggctgaggcaggaggatagcttgagccggggaggtcaaaactgcagtgagccttaatcacatcactgggcagcagagtgagaccctatctcaaaaaaaaaagaggccggggatggtggctcacacctgtaatcccagcactttgggaggctgaggcgggtggatcacctgagatcaggagttcaagaccagcctagtcaacatggcgaaaccccatctctactaaaaataaaaaaattagccaggcatggtggttcacgcctatagtctcagctcctcgggaggctgaggcaggagaatcgcttgtacttgggaggtggaggttgcagtgagccgagatcatgccactgcactccagcttgggtgacagagcaagactctgtctcaaaagaaaaaaaaaaaaggtagatttatgtataataaggggctccattttgagaggcctggaaatgattaaaatattcttaattggctgggcgcagtggctgacgcttgtaatcccagcactttgggaggccaaggcaggcagatcatgaggtcaggagatcgagaccatcctggctaacacggtgaaaccccgtttctactaaaaaatacaaagaattagccgggcgtggtggcgggtgcttgtagtcctagctactcgggcagctg

SEQ ID NO: 635 - DNA, 2402 bp, Homo sapiens
ctggaacccggaagcggcagcgcggcgcgacccggcgggcgggctctgggcgcgggaatcccggcggatcccgggcgggcggatgacccccagccctacccttggtgccgcctcctcctctctcctttctcctccggcagccagcgcgcctgtgtcctctctaggaaggggtaggggaggggcgtctggagaggaccccccgcgaatgcccacgtgacgtgcagtccccctggggctgttccggcctgcggggaacatgggcgtgctcagggtcggactgtgccctggccttaccgaggagatgatccagcttctcaggagccacaggatcaagacagtggtggacctggtttctgcagacctggaagaggtagctcagaaatgtggcttgtcttacaaggccctggttgccctgaggcgggtgctgctggctcagttctcggctttccccgtgaatggcgctgatctctacgaggaactgaagacctccactgccatcctgtccactggcattggcagtcttgataaactgcttgatgctggtctctatactggagaagtgactgaaattgtaggaggcccaggtagcggcaaaactcaggtatgtctctgtatggcagcaaatgtggcccatggcctgcagcaaaacgtcctatatgtagattccaatggagggctgacagcttcccgcctcctccagctgcttcaggctaaaacccaggatgaggaggaacaggcagaagctctccggaggatccaggtggtgcatgcatttgacatcttccagatgctggatgtgctgcaggagctccgaggcactgtggcccagcaggtgactggttcttcaggaactgtgaaggtggtggttgtggactcggtcactgcggtggtttccccacttctgggaggtcagcagagggaaggcttggccttgatgatgcagctggcccgagagctgaagaccctggcccgggaccttggcatggcagtggtggtgaccaaccacataactcgagacagggacagcgggaggctcaaacctgccctcggacgctcctggagctttgtgcccagcactcggattctcctggacaccatcgagggagcaggagcatcaggcggccggcgcatggcgtgtctggccaaatcttcccgacagccaacaggtttccaggagatggtagacattgggacctgggggacctcagagcagagtgccacattacagggtgatcagacatgacctgtgctgttgtttgggaaacagggaagcattggggacccctcccaacttttcttcccagtaacgcctgctgtttactgccacctggcactggtgactacagacgttctcaggctggccagaagagacatcttgggttccttggcctcactctctgtaagcatataaaccacaggcgaaagaggatgctgcattgcgaggacccagaaattcatactggtgccacgtttccttcccttatttctaacgtgtatgtttctggtggaaaccaagttcaccctggctgggagcatctctgatgaggcatgctggcgactggatggataatcctgtgcatcaccattgtgtcctgtgctccctcctagcgcagtggccaagccgggaaagcctctaacttgcctttgctgctgctgccttttttttcttttgtctctgcctttccatttgttagatgggggcccactcttccttagctctgtctctgagttactgggtggaaataagcttataaatgaaatactcttcttcatctctgttttgctcttaaaaatataaaaaggcaattccccgagccctagagccacctgatttccccttagaaggctgtttttcagtttcccccagtgaggcccaaagaacagtttattcctcctttcctcttgctgatttggtttcagacctgcctgcatcaccatgactaggtgagaacgtgtgggctcgctgcagttccagggatataatttaacagaaagggagggtatgacctgctcctggtgaatccagccactcatttaatatgcatggtgccctgtggggcccctccacagtacagcataaccagaggtgctgaaccatggccttgcccataaacagacagaggagaatttgcacagtaaatagagccagctgggaaaattgatgctgacgtaaataatacatggcaaatctagtcctttatgcagaaattcattgctggtggctccaagatgcaatataattacacctctcttcctgccagctgtaccacagctagtgccctagtgtatgaaataatccctctgtctttcaccagcactgtggccatccgtctgagagccatgaccctggctgggaggggacgaagacaccagggaatggaaaataaaaggaaaagtacaga

SEQ ID NO: 636 - DNA, 2082 bp, Homo sapiens
ctggaacccggaagcggcagcgcggcgcgacccggcgggcgggctctgggcgcgggaatcccggcggatcccgggcgggcggatgacccccagccctacccttggtgccgcctcctcctctctcctttctcctccggcagccagcgcgcctgtgtcctctctaggaaggggtaggggaggggcgtctggagaggaccccccgcgaatgcccacgtgacgtgcagtccccctggggctgttccggcctgcggggaacatgggcgtgctcagggtcggactgtgccctggccttaccgaggagatgatccagcttctcaggagccacaggatcaagacagtggtggacctggtttctgcagacctggaagaggtagctcagaaatgtggcttgtcttacaaggcagaagctctccggaggatccaggtggtgcatgcatttgacatcttccagatgctggatgtgctgcaggagctccgaggcactgtggcccagcaggtgactggttcttcaggaactgtgaaggtggtggttgtggactcggtcactgcggtggtttccccacttctgggaggtcagcagagggaaggcttggccttgatgatgcagctggcccgagagctgaagaccctggcccgggaccttggcatggcagtggtggtgaccaaccacataactcgagacagggacagcgggaggctcaaacctgccctcggacgctcctggagctttgtgcccagcactcggattctcctggacaccatcgagggagcaggagcatcaggcggccggcgcatggcgtgtctggccaaatcttcccgacagccaacaggtttccaggagatggtagacattgggacctgggggacctcagagcagagtgccacattacagggtgatcagacatgacctgtgctgttgtttgggaaacagggaagcattggggacccctcccaacttttcttcccagtaacgcctgctgtttactgccacctggcactggtgactacagacgttctcaggctggccagaagagacatcttgggttccttggcctcactctctgtaagcatataaaccacaggcgaaagaggatgctgcattgcgaggacccagaaattcatactggtgccacgtttccttcccttatttctaacgtgtatgtttctggtggaaaccaagttcaccctggctgggagcatctctgatgaggcatgctggcgactggatggataatcctgtgcatcaccattgtgtcctgtgctccctcctagcgcagtggccaagccgggaaagcctctaacttgcctttgctgctgctgccttttttttcttttgtctctgcctttccatttgttagatgggggcccactcttccttagctctgtctctgagttactgggtggaaataagcttataaatgaaatactcttcttcatctctgttttgctcttaaaaatataaaaaggcaattccccgagccctagagccacctgatttccccttagaaggctgtttttcagtttcccccagtgaggcccaaagaacagtttattcctcctttcctcttgctgatttggtttcagacctgcctgcatcaccatgactaggtgagaacgtgtgggctcgctgcagttccagggatataatttaacagaaagggagggtatgacctgctcctggtgaatccagccactcatttaatatgcatggtgccctgtggggcccctccacagtacagcataaccagaggtgctgaaccatggccttgcccataaacagacagaggagaatttgcacagtaaatagagccagctgggaaaattgatgctgacgtaaataatacatggcaaatctagtcctttatgcagaaattcattgctggtggctccaagatgcaatataattacacctctcttcctgccagctgtaccacagctagtgccctagtgtatgaaataatccctctgtctttcaccagcactgtggccatccgtctgagagccatgaccctggctgggaggggacgaagacaccagggaatggaaaataaaaggaaaagtacagaaaaaaaaaaaaaaaaa

SEQ ID NO: 637 - DNA, 2462 bp, Homo sapiens
ctggaacccggaagcggcagcgcggcgcgacccggcgggcgggctctgggcgcgggaatcccggcggatcccgggcgggcggatgacccccagccctacccttggtgccgcctcctcctctctcctttctcctccggcagccagcgcgcctgtgtcctctctaggaaggggtaggggaggggcgtctggagaggaccccccgcgaatgcccacgtgacgtgcagtccccctggggctgttccggcctgcggggaacatgggcgtgctcagggtcggactgtgccctggccttaccgaggagatgatccagcttctcaggagccacaggatcaagacagtggtggacctggtttctgcagacctggaagaggtagctcagaaatgtggcttgtcttacaagacatggagggcgcactcaagtgggaacctgggaggactgcagctgcctcaggtccccgcagggagatcgtggagtggggtcaggaatgctctgaagaaggcaggacttgggcatggaggaacagatggactttcgctgaatgctttcgatgaacgaggcactgcggtcagcacttcacgtcttgataaactgcttgatgctggtctctatactggagaagtgactgaaattgtaggaggcccaggtagcggcaaaactcaggtatgtctctgtatggcagcaaatgtggcccatggcctgcagcaaaacgtcctatatgtagattccaatggagggctgacagcttcccgcctcctccagctgcttcaggctaaaacccaggatgaggaggaacaggcagaagctctccggaggatccaggtggtgcatgcatttgacatcttccagatgctggatgtgctgcaggagctccgaggcactgtggcccagcaggtgactggttcttcaggaactgtgaaggtggtggttgtggactcggtcactgcggtggtttccccacttctgggaggtcagcagagggaaggcttggccttgatgatgcagctggcccgagagctgaagaccctggcccgggaccttggcatggcagtggtggtgaccaaccacataactcgagacagggacagcgggaggctcaaacctgccctcggacgctcctggagctttgtgcccagcactcggattctcctggacaccatcgagggagcaggagcatcaggcggccggcgcatggcgtgtctggccaaatcttcccgacagccaacaggtttccaggagatggtagacattgggacctgggggacctcagagcagagtgccacattacagggtgatcagacatgacctgtgctgttgtttgggaaacagggaagcattggggacccctcccaacttttcttcccagtaacgcctgctgtttactgccacctggcactggtgactacagacgttctcaggctggccagaagagacatcttgggttccttggcctcactctctgtaagcatataaaccacaggcgaaagaggatgctgcattgcgaggacccagaaattcatactggtgccacgtttccttcccttatttctaacgtgtatgtttctggtggaaaccaagttcaccctggctgggagcatctctgatgaggcatgctggcgactggatggataatcctgtgcatcaccattgtgtcctgtgctccctcctagcgcagtggccaagccgggaaagcctctaacttgcctttgctgctgctgccttttttttcttttgtctctgcctttccatttgttagatgggggcccactcttccttagctctgtctctgagttactgggtggaaataagcttataaatgaaatactcttcttcatctctgttttgctcttaaaaatataaaaaggcaattccccgagccctagagccacctgatttccccttagaaggctgtttttcagtttcccccagtgaggcccaaagaacagtttattcctcctttcctcttgctgatttggtttcagacctgcctgcatcaccatgactaggtgagaacgtgtgggctcgctgcagttccagggatataatttaacagaaagggagggtatgacctgctcctggtgaatccagccactcatttaatatgcatggtgccctgtggggcccctccacagtacagcataaccagaggtgctgaaccatggccttgcccataaacagacagaggagaatttgcacagtaaatagagccagctgggaaaattgatgctgacgtaaataatacatggcaaatctagtcctttatgcagaaattcattgctggtggctccaagatgcaatataattacacctctcttcctgccagctgtaccacagctagtgccctagtgtatgaaataatccctctgtctttcaccagcactgtggccatccgtctgagagccatgaccctggctgggaggggacgaagacaccagggaatggaaaataaaaggaaaagtacaga

SEQ ID NO: 638 - DNA, 1500 bp, Homo sapiens
atgtggatgtgaagtccagccctgtgccgcctagctgggtgacctttggcaagtgatttaacctcactgaacctcagtttcttcattggtgaaacagggataaaaaatagcgcctccctcacagatttgtgatgagataaccatgtaaagttttatttcttcctatggatgaggcaaagcaaaggacatttaaaaataccaaatcatatctttttgtgtgtgttctatataaccaaggtttcttgcccttaaaaaaaataaaaaataaaataaaaaatagaggccgggcacggtggctcacacctgtaatccccgcacttcgggagaccaaggcaggaggattgtttgagcccagtagttcgagacctgtgtgggcaacatggtgtaaccccattttgtagaggcgaaacctctacaaaaaatacaaaaattagctgggcaaggtggcacgtgactgtagtcccagctactcaggaggctgaggcaggaggatcgcttgaacccaggaggtcgaggctgcaaagctgagatctcaccagggcactccagcctgggcggccgatcgagaccctgtctcaaccaaaacaaaacaaacttttgaaaaatagacgcaggtgccctctggatgctttgctgcttcttgacacctgtcgtataatctgtaatgatgtgatttctgcgattccttttcattgtctgtctttcccttgctcacagtaagctccctgggggtaagggcgggtcgtcttgtgtcgcattttgtctccagcggagatccgttccgtttggaacggaagctggcgcacagaaggctctttagaaggtcggtgtgtgtgttgcggcagaaggtagaggccgaatgtggccgcgggtggcgtgttgagcgcggagggggtcgtgggactcgggaacctgtgcaggcggtggagaggggcgcagcggctctgccccgtgcggcccgcagatggcgctgcaggccaggtcctcgccgcgcgccagcctggaacccggaagcggcagcgcggcgcgacccggcgggcgggctctgggcgcgggaatcccggcggatcccgggcgggcggatgacccccagccctacccttggtgccgcctcctcctctctcctttctcctccggcagccagcgcgcctgtgtcctctctaggaaggggtaggggaggggcgtctggagaggaccccccgcgaatgcccacgtgacgtgcagtccccctggggctgttccggcctgcggggaacatgggcgtgctcagggtcggactgtgccctggccttaccgaggagatgatccagcttctcaggagccacaggatcaagacaggtgaccgggtgtgcgcgtgccagggagccgcgcgggcctcgcacaacctgggcaggccccgagggctggcgcactgccctggcatacctgcagggcgcttcccctccattcctagagggccgcgcttctggagaggctcaggaagggtgggcgtggggagcc

SEQ ID NO: 639 - DNA, 1338 bp, Homo sapiens
acccaggaggtcgaggctgcaaagctgagatctcaccagggcactccagcctgggcggccgatcgagaccctgtctcaaccaaaacaaaacaaacttttgaaaaatagacgcaggtgccctctggatgctttgctgcttcttgacacctgtcgtataatctgtaatgatgtgatttctgcgattccttttcattgtctgtctttcccttgctcacagtaagctccctgggggtaagggcgggtcgtcttgtgtcgcattttgtctccagcggagatccgttccgtttggaacggaagctggcgcacagaaggctctttagaaggtcggtgtgtgtgttgcggcagaaggtagaggccgaatgtggccgcgggtggcgtgttgagcgcggagggggtcgtgggactcgggaacctgtgcaggcggtggagaggggcgcagcggctctgccccgtgcggcccgcagatggcgctgcaggccaggtcctcgccgcgcgccagcctggaacccggaagcggcagcgcggcgcgacccggcgggcgggctctgggcgcgggaatcccggcggatcccgggcgggcggatgacccccagccctacccttggtgccgcctcctcctctctcctttctcctccggcagccagcgcgcctgtgtcctctctaggaaggggtaggggaggggcgtctggagaggaccccccgcgaatgcccacgtgacgtgcagtccccctggggctgttccggcctgcggggaacatgggcgtgctcagggtcggactgtgccctggccttaccgaggagatgatccagcttctcaggagccacaggatcaagacaggtgaccgggtgtgcgcgtgccagggagccgcgcgggcctcgcacaacctgggcaggccccgagggctggcgcactgccctggcatacctgcagggcgcttcccctccattcctagagggccgcgcttctggagaggctcaggaagggtgggcgtggggagccaagctctaaaacagggtagagattcctactgtgtgcagggcaccgcgccggctcctgcagctttgttatttcacactggcctcctgagacggcctgccggggggtagaattgacaccccatttgacagatgaggaaaaaccaagtgtgggaggccccagtcctctctgccaatccgctatacgtgttttgttttcagtggtggacctggtttctgcagacctggaagaggtagctcagaaatgtggcttgtcttacaaggtgagctcctgatctccacattccaaacctgagtgtctttttaaaaagtccatcccaagccagctgggcgcggtggctc

SEQ ID NO: 640 - DNA, 1062 bp, Homo sapiens
ccccgcgaatgcccacgtgacgtgcagtccccctggggctgttccggcctgcggggaacatgggcgtgctcagggtcggactgtgccctggccttaccgaggagatgatccagcttctcaggagccacaggatcaagacaggtgaccgggtgtgcgcgtgccagggagccgcgcgggcctcgcacaacctgggcaggccccgagggctggcgcactgccctggcatacctgcagggcgcttcccctccattcctagagggccgcgcttctggagaggctcaggaagggtgggcgtggggagccaagctctaaaacagggtagagattcctactgtgtgcagggcaccgcgccggctcctgcagctttgttatttcacactggcctcctgagacggcctgccggggggtagaattgacaccccatttgacagatgaggaaaaaccaagtgtgggaggccccagtcctctctgccaatccgctatacgtgttttgttttcagtggtggacctggtttctgcagacctggaagaggtagctcagaaatgtggcttgtcttacaaggtgagctcctgatctccacattccaaacctgagtgtctttttaaaaagtccatcccaagccagctgggcgcggtggctcatgcctgtaatcccagcactttgggaggccgaggcgggtgggtcacttggagtcagaagtcaggagttcgagaccatccaggccaacatggtgaaaccctgtccctactaaaaatacaaaaattagctgggtgtggtggcccacgcctacaatcccagctactcgggaggctgaggaaggagaatcatttgagcccgggaggcagaggttgcagtgagccgagatcgtgctactgcactccaatctgggcgacagagtgagaccctgtctgaaacaacaacaataacaaaagtccatcccaagccaaagggagcagagggttctcagatattgagaagtagggtgaatgacaccctgggatgccagcttctacgggcaatttgttgctgagcagtctggggccctttggcaggccctggtt

SEQ ID NO: 641 - DNA, 1179 bp, Homo sapiens
agccttggtggcagagcgagactctctcaaaaaaaaggagcagttatgtcccgccacgttgtttggtgggttggggaagagttgcaaagacgacagacgtttgctggccaagtgagtcttgacctttttcctggtctgtttgttcagaaattgatgaataactgccaccataaaggtctttggattggtgtggccctttctgtttccttaacacattctcttggcagggttcatgcagtgtggtgcttgctttccctggttgggggtctgagtctgtgatccatcaagcactggctaagggcctgctgggtgcttggtatgtgcagatgatacatacacgaatgaggcaaggcccctgcccttaaggcctctagttgggtgtaggggaaaatcaagtgaatacaagagagctgtaagcaccgagggaggcaacggtaaggagggagtggtgaacaggaagccgattggccttgggcttagggagtttataaatccaacagacatggagggcgcactcaagtgggaacctgggaggactgcagctgcctcaggtccccgcagggagatcgtggagtggggtcaggaatgctctgaagaaggcaggacttgggcatggaggaacagatggactttcgctgaatgctttcgatgaacgaggcactgcggtcagcacttcacggtacattatttcatttattcgtcacaaccaccaatgagcatgttactgtttaaatcatcattctaggccgggcgcagtggctcacgcctgtgatcacagcactttgggaggctgaggtgggcggatcatgaggtcaggaaatcgagactgtcctggctaacacggtaaaaccccgtctctactaaaagtacaaaatattagctgggcgtggtggcgggcgcctgtagtcccagctactcggaaggctgaggcaggagaatagcatgaacccgggaagcggagcttgcagtgagcggagatcgcaccactgcactccagcctgggcaacagggcaagactccatctcaaaaaaataaaataaaataaaataaaataaaaataaatcatcattctataggtgaagaaattgggactcaggttaaatgacttgttcaagattgtgcagttagcaaacggcagaccagttatttgagttcatgcttgtcacactcctaagtcta

SEQ ID NO: 642 - DNA, 1119 bp, Homo sapiens
tcttacaaggtgagctcctgatctccacattccaaacctgagtgtctttttaaaaagtccatcccaagccagctgggcgcggtggctcatgcctgtaatcccagcactttgggaggccgaggcgggtgggtcacttggagtcagaagtcaggagttcgagaccatccaggccaacatggtgaaaccctgtccctactaaaaatacaaaaattagctgggtgtggtggcccacgcctacaatcccagctactcgggaggctgaggaaggagaatcatttgagcccgggaggcagaggttgcagtgagccgagatcgtgctactgcactccaatctgggcgacagagtgagaccctgtctgaaacaacaacaataacaaaagtccatcccaagccaaagggagcagagggttctcagatattgagaagtagggtgaatgacaccctgggatgccagcttctacgggcaatttgttgctgagcagtctggggccctttggcaggccctggttgccctgaggcgggtgctgctggctcagttctcggctttccccgtgaatggcgctgatctctacgaggaactgaagacctccactgccatcctgtccactggcattggcaggtttgtgtgtgtacttggggaagaaggagagaggcaggaggatggggcctcctctcagctctgcttttgatgcttgagtctagacgggaggggttttttttttaaccaataatggatgggaaggaaaggggtcaggacatctgaattcttatcctataacagggttatggggtatctcagccttggcactattgatatttagggacaggtaattatttgttggggggtggaggctgtcctgtgcagtgtaggatgtttagcagcatctctggcctctgcccactagatgccagtagcaccagccctgctccagttgtaaccatcaaaaatgtctcctgacatggctaaatgtcccctgggaggcacaattgcctctggttgagaagcattgtcctataacacaagctgtcagtatctcattattttcaccatcttctctggccctacttcttattttacttaaggatatggcaagagagaacatttactgagtgcctact

SEQ ID NO: 643 - DNA, 1082 bp, Homo sapiens
tgaaaccccgtctctaattaaaaaaactagtcgggtatggtggcgggcacctgtagtcccagctactcgggaggctgaggcaggaaaatcacttgagcctgggaggtggaggttgcagtgagtagagatcacgccactgcactccagcactccggcctggacaacaaagagagactccgtctcaaaaaaaaaaaaaaaaaaaaaaaaaaaggaaacccacagggcctgagatgaaaaatgaagggagaaccttctgatggggtggcagaggcctctctggagagctgatctttaagagtggagggatgaagagagaccagagaaggcacatttgggcattccctccttaccagaagaaaacaccaggagaagcctcctggccagtgatgttcaaagacagaaccagtgcttgaaagaaatgtcttacttttcttcttggtaccttttcccctgtcttcctcctaacctcttgtgttgattttcttctcttctgccatcagtcttgataaactgcttgatgctggtctctatactggagaagtgactgaaattgtaggaggcccaggtagcggcaaaactcaggtacatgtgaggccagcagtcaggaggatttaggggtgagggtggtagatgcatagcccagggtccctgggggagcttcagcgtactaatgggttcagagcccaacagagagaagatgggtaataaggaatggggtcgggactcagcccatttgtgttgctggaatctgggcaaggtttggtggggagctcccatctggaccctctctgaagtgtcaagttcatccaatgcccccacccccaggtatgtctctgtatggcagcaaatgtggcccatggcctgcagcaaaacgtcctatatgtagattccaatggagggctgacagcttcccgcctcctccagctgcttcaggctaaaacccaggatgaggaggaacaggtaagggcaggatgctgggttccattgagattctgacacaggaaaaccccattatcccttaacattgtaagaatttgggttgaatagtcattccttgccttcaaacttgctgttctattaat

SEQ ID NO: 644 - DNA, 1135 bp, Homo sapiens
gcacatttgggcattccctccttaccagaagaaaacaccaggagaagcctcctggccagtgatgttcaaagacagaaccagtgcttgaaagaaatgtcttacttttcttcttggtaccttttcccctgtcttcctcctaacctcttgtgttgattttcttctcttctgccatcagtcttgataaactgcttgatgctggtctctatactggagaagtgactgaaattgtaggaggcccaggtagcggcaaaactcaggtacatgtgaggccagcagtcaggaggatttaggggtgagggtggtagatgcatagcccagggtccctgggggagcttcagcgtactaatgggttcagagcccaacagagagaagatgggtaataaggaatggggtcgggactcagcccatttgtgttgctggaatctgggcaaggtttggtggggagctcccatctggaccctctctgaagtgtcaagttcatccaatgcccccacccccaggtatgtctctgtatggcagcaaatgtggcccatggcctgcagcaaaacgtcctatatgtagattccaatggagggctgacagcttcccgcctcctccagctgcttcaggctaaaacccaggatgaggaggaacaggtaagggcaggatgctgggttccattgagattctgacacaggaaaaccccattatcccttaacattgtaagaatttgggttgaatagtcattccttgccttcaaacttgctgttctattaatacatctcgtattccttaagccacccctgttgatgccatcatcccatttgggatgctactcacactgattcttccaggaaaccctcccaactctttgcatgccctaaaccagggctggcaaacaccaagctttgtgtttccagtccatttctcacctgtgagagacatcactaatcagtcatatccctctttcctgctgagttctgagtactttacagctcagcacccaggcagccaccactgtgacaactgaccattagacaaagctcatttgccaccctggacctgagtccttgcatccaggtgcctcttccttctcagccttaccttgacccccctactccctcttatccaaagtccttgcttttcttttccaccg

SEQ ID NO: 645 - DNA, 1096 bp, Homo sapiens
gcaggatgctgggttccattgagattctgacacaggaaaaccccattatcccttaacattgtaagaatttgggttgaatagtcattccttgccttcaaacttgctgttctattaatacatctcgtattccttaagccacccctgttgatgccatcatcccatttgggatgctactcacactgattcttccaggaaaccctcccaactctttgcatgccctaaaccagggctggcaaacaccaagctttgtgtttccagtccatttctcacctgtgagagacatcactaatcagtcatatccctctttcctgctgagttctgagtactttacagctcagcacccaggcagccaccactgtgacaactgaccattagacaaagctcatttgccaccctggacctgagtccttgcatccaggtgcctcttccttctcagccttaccttgacccccctactccctcttatccaaagtccttgcttttcttttccaccgcttcaggcagaagctctccggaggatccaggtggtgcatgcatttgacatcttccagatgctggatgtgctgcaggagctccgaggcactgtggcccagcaggtgagcctgctgttctgcccctccttgcttaattcagctttctaggtgctatctctgtgggcaggtgtcctactacagactgtttggaaatgcagatgtgcaatctggtgactccaactatgcttgctactcccaggatggaattcccgagcacctaaatcacatacctcattgtttacatgttcatcttccctgctgaacagtaaagccccctgagtggaaggatcatgtcatatttatgtctgcattccccactaggtgagtgaggaatacttttagctgcaagtaatagaggttgtctgacagagacttgaagcttgaggacatttaattatgtcacatgagttgggaggttggcaggtccatgctatcagggcaatagatttgtgtgtctgattttcttgttcttcccctcatggttgcaaagaggctgccaaagctccaagcatcttgtcttcacacatccacatccatattcaaggcagtaaaagatagatggt

SEQ ID NO: 646 - DNA, 1091 bp, Homo sapiens
atgcagcggtgtgatctcagttcactgcaacccccgcctcccagtttcaagcgattctcctgcctcagcctcctgagtagctgggattacaggtgtgcaccaccacgcccagctaatttttgtatgtttagtggagacggggtttcaccatgttggccaggctggtctcgaactcctgacctcaagtgatccaccgccttggcctcccaaagtgctgggattacaggcgtgagccactgcgcccagccactttagtgtagttttgatgtcctgtgatttaaaccctttctttctacccaagtcttcattgaagtctgttacacatgccaatgggacgagggagacattgctgctgatgacattctgtgatgcccgtgcagcttgctgtatttgggatgggggggctatttcttactagttttagatagaaaagcaagcttgtcctgtaatgtgtcctagaggctgacaggttcatgagtgcttcccccacattccttcaggtgactggttcttcaggaactgtgaaggtggtggttgtggactcggtcactgcggtggtttccccacttctgggaggtcagcagagggaaggtgagtgatgtggcagagcctggggccagtggaatgtgacctcgcctcccagctctggagtctggtctctggccagccccatccctggttccccactgccctccctctctgcttctcctcctcctgcaggcttggccttgatgatgcagctggcccgagagctgaagaccctggcccgggaccttggcatggcagtggtggtgaggaagcaggcttggccaatgaacttgatttctagttattgcgagctctttatttcccttaaatgtcagcttctgaaccccaaagtggccctttaggaaagggacatatcccagcttccctgggtcagctacagctttgcaccataaatagctaagggaatcaggaatcgtcttgttgtttttttgttgttttgttttgtttctacattttttctttttagtcaggtttattgaggtataatttacatagagtaactttctccttgtttgaagtttgactaatggatatagttgtat

SEQ ID NO: 647 - DNA, 1071 bp, Homo sapiens
ttacaggcgtgagccactgcgcccagccactttagtgtagttttgatgtcctgtgatttaaaccctttctttctacccaagtcttcattgaagtctgttacacatgccaatgggacgagggagacattgctgctgatgacattctgtgatgcccgtgcagcttgctgtatttgggatgggggggctatttcttactagttttagatagaaaagcaagcttgtcctgtaatgtgtcctagaggctgacaggttcatgagtgcttcccccacattccttcaggtgactggttcttcaggaactgtgaaggtggtggttgtggactcggtcactgcggtggtttccccacttctgggaggtcagcagagggaaggtgagtgatgtggcagagcctggggccagtggaatgtgacctcgcctcccagctctggagtctggtctctggccagccccatccctggttccccactgccctccctctctgcttctcctcctcctgcaggcttggccttgatgatgcagctggcccgagagctgaagaccctggcccgggaccttggcatggcagtggtggtgaggaagcaggcttggccaatgaacttgatttctagttattgcgagctctttatttcccttaaatgtcagcttctgaaccccaaagtggccctttaggaaagggacatatcccagcttccctgggtcagctacagctttgcaccataaatagctaagggaatcaggaatcgtcttgttgtttttttgttgttttgttttgtttctacattttttctttttagtcaggtttattgaggtataatttacatagagtaactttctccttgtttgaagtttgactaatggatatagttgtatccagtcttgtgaccccaccaaaaggtcccccaggcccaggcaaccactgatctgttttccatcccaatagtttggccttttccagagcttcatataaatggatctttttgctattgaagtaactttttctgcttatgaggtagtttttttaaagtctgcatgcttctcatagaaaggatagaaaataaatatgattcaaa

SEQ ID NO: 648 - DNA, 1165 bp, Homo sapiens
ctgtatctatgctttttgactactctaggaacctcatatacatggaatcatatggtatttactttttgtgactggagtatttcacttagcataatgtccagaaggttcatccaccttgtagcatgtgtcagactttccttccttttaaaggctgagtgtctgggcgtggtggcccacacttgtaatcccagcactttgggaggctgaggctggcggactgcatgagctcaagagtttgagaccagcctggaaagcatggtgacatgtgccccatcgccttctggttcgggtcaaacctgaggcatcgagatttagtggaaagagcggggcacaagtcaggaggcccaggttctagttccagacctgccattaggttttgtaaccttggggaagttatttctctgtgctaggcctctgttttcctctccgtaaaatgaagcggtagtaatcgatgtcctctatactagcattatggatctgtaagtctgtttctgctgcaggtgaccaaccacataactcgagacagggacagcgggaggctcaaacctgccctcggacgctcctggagctttgtgcccagcactcggattctcctggacaccatcgagggagcaggagcatcaggcggccggcgcatggcgtgtctggccaaatcttcccgacaggtgagccagccccaggaagatgccagtaatcttgggccctggagggtggtttccatacccacagatgtcttcgagaagaactctttagaggctgaaaccttgcaactaaagaagctacccacttgggttgcttaactccactgactccttacttcttcttccagccaacaggtttccaggagatggtagacattgggacctgggggacctcagagcagagtgccacattacagggtgatcagacatgacctgtgctgttgtttgggaaacagggaagcattggggacccctcccaacttttcttcccagtaacgcctgctgtttactgccacctggcactggtgactacagacgttctcaggctggccagaagagacatcttgggttccttggcctcactctctgtaagcatataaaccacaggcgaaagaggatgctgcattgcgaggacccagaaattcatactggtgccacgtttccttcccttatttctaacgtgt

SEQ ID NO: 649 - DNA, 2245 bp, Homo sapiens
cacaagtcaggaggcccaggttctagttccagacctgccattaggttttgtaaccttggggaagttatttctctgtgctaggcctctgttttcctctccgtaaaatgaagcggtagtaatcgatgtcctctatactagcattatggatctgtaagtctgtttctgctgcaggtgaccaaccacataactcgagacagggacagcgggaggctcaaacctgccctcggacgctcctggagctttgtgcccagcactcggattctcctggacaccatcgagggagcaggagcatcaggcggccggcgcatggcgtgtctggccaaatcttcccgacaggtgagccagccccaggaagatgccagtaatcttgggccctggagggtggtttccatacccacagatgtcttcgagaagaactctttagaggctgaaaccttgcaactaaagaagctacccacttgggttgcttaactccactgactccttacttcttcttccagccaacaggtttccaggagatggtagacattgggacctgggggacctcagagcagagtgccacattacagggtgatcagacatgacctgtgctgttgtttgggaaacagggaagcattggggacccctcccaacttttcttcccagtaacgcctgctgtttactgccacctggcactggtgactacagacgttctcaggctggccagaagagacatcttgggttccttggcctcactctctgtaagcatataaaccacaggcgaaagaggatgctgcattgcgaggacccagaaattcatactggtgccacgtttccttcccttatttctaacgtgtatgtttctggtggaaaccaagttcaccctggctgggagcatctctgatgaggcatgctggcgactggatggataatcctgtgcatcaccattgtgtcctgtgctccctcctagcgcagtggccaagccgggaaagcctctaacttgcctttgctgctgctgccttttttttcttttgtctctgcctttccatttgttagatgggggcccactcttccttagctctgtctctgagttactgggtggaaataagcttataaatgaaatactcttcttcatctctgttttgctcttaaaaatataaaaaggcaattccccgagccctagagccacctgatttccccttagaaggctgtttttcagtttcccccagtgaggcccaaagaacagtttattcctcctttcctcttgctgatttggtttcagacctgcctgcatcaccatgactaggtgagaacgtgtgggctcgctgcagttccagggatataatttaacagaaagggagggtatgacctgctcctggtgaatccagccactcatttaatatgcatggtgccctgtggggcccctccacagtacagcataaccagaggtgctgaaccatggccttgcccataaacagacagaggagaatttgcacagtaaatagagccagctgggaaaattgatgctgacgtaaataatacatggcaaatctagtcctttatgcagaaattcattgctggtggctccaagatgcaatataattacacctctcttcctgccagctgtaccacagctagtgccctagtgtatgaaataatccctctgtctttcaccagcactgtggccatccgtctgagagccatgaccctggctgggaggggacgaagacaccagggaatggaaaataaaaggaaaagtacagaaatgatcaggattggttactggccacatcttttaaaggaaggtcatctttcttggttagagagcctgttgtgtaattaatcagttatgtcttggctgcaggaaaggagggtccgagttacactcagaaagtaatgacatttagaggtgatgaatgcaacagggatagaatcatggaggattgggaaggagtggcaaactggcaccagggtgttggattcaggacagggttggtaagcctaagcctgggggaatcctagcgcttgctttcacagaagacctcaggagaaattaatcttcagtatctttataccatgggtgattggcacattcctgcaaccacagtaagatgcaatacatgaagctggaaattgcaaattcttgccactcaaggtactatttgggcatcttcagcccacagcagacatgaccaatcgggcacaagcactcttttttgtggaagtcaaagtgtttttagaagtttttctcaatatagcactccag

SEQ ID NO: 650 - DNA, 1500 bp, Homo sapiens
gctgatttggtttcagacctgcctgcatcaccatgactaggtgagaacgtgtgggctcgctgcagttccagggatataatttaacagaaagggagggtatgacctgctcctggtgaatccagccactcatttaatatgcatggtgccctgtggggcccctccacagtacagcataaccagaggtgctgaaccatggccttgcccataaacagacagaggagaatttgcacagtaaatagagccagctgggaaaattgatgctgacgtaaataatacatggcaaatctagtcctttatgcagaaattcattgctggtggctccaagatgcaatataattacacctctcttcctgccagctgtaccacagctagtgccctagtgtatgaaataatccctctgtctttcaccagcactgtggccatccgtctgagagccatgaccctggctgggaggggacgaagacaccagggaatggaaaataaaaggaaaagtacagaaatgatcaggattggttactggccacatcttttaaaggaaggtcatctttcttggttagagagcctgttgtgtaattaatcagttatgtcttggctgcaggaaaggagggtccgagttacactcagaaagtaatgacatttagaggtgatgaatgcaacagggatagaatcatggaggattgggaaggagtggcaaactggcaccagggtgttggattcaggacagggttggtaagcctaagcctgggggaatcctagcgcttgctttcacagaagacctcaggagaaattaatcttcagtatctttataccatgggtgattggcacattcctgcaaccacagtaagatgcaatacatgaagctggaaattgcaaattcttgccactcaaggtactatttgggcatcttcagcccacagcagacatgaccaatcgggcacaagcactcttttttgtggaagtcaaagtgtttttagaagtttttctcaatatagcactccagggggccactaccagtcagttggagttggtattcaaggtggagtctggttgccgtctctgccctgttcccattatgtagtgagttcaggtacttaatacctaactgaggaccctaggactgcagtttgagatcatctggggccaggcacagtggctcacacctataatggtagcactttgggagcctgaggcgggaggatcacttgagcccaggagtttaacagtttaaaatcagcctgggcaacatgatgagacatcgtttctacaaaaaaattttttaaattagctaggcattgtgatgtgcacctgtggtccctgctacttgggagcctgaggcaggagaatcgcttgaaccttggaggttgtggctgcagtgagccctgatcgcaccactacaccccagcctgggtaacagagcaagaccctgtctcaaggaaaaaaaaaatcatctggcccatcctgttacttaacagagaaggtacctgaggctcaaaaaggatg

SEQ ID NO: 651 - DNA, 5629 bp, Homo sapiens
agtcccgcgaccgaagcagggcgcgcagcagcgctgagtgccccggaacgtgcgtcgcgcccccagtgtccgtcgcgtccgccgcgccccgggcggggatggggcggccagactgagcgccgcacccgccatccagacccgccggccctagccgcagtccctccagccgtggccccagcgcgcacgggcgatggcgaaggcgacgtccggtgccgcggggctgcgtctgctgttgctgctgctgctgccgctgctaggcaaagtggcattgggcctctacttctcgagggatgcttactgggagaagctgtatgtggaccaggcggccggcacgcccttgctgtacgtccatgccctgcgggacgcccctgaggaggtgcccagcttccgcctgggccagcatctctacggcacgtaccgcacacggctgcatgagaacaactggatctgcatccaggaggacaccggcctcctctaccttaaccggagcctggaccatagctcctgggagaagctcagtgtccgcaaccgcggctttcccctgctcaccgtctacctcaaggtcttcctgtcacccacatcccttcgtgagggcgagtgccagtggccaggctgtgcccgcgtatacttctccttcttcaacacctcctttccagcctgcagctccctcaagccccgggagctctgcttcccagagacaaggccctccttccgcattcgggagaaccgacccccaggcaccttccaccagttccgcctgctgcctgtgcagttcttgtgccccaacatcagcgtggcctacaggctcctggagggtgagggtctgcccttccgctgcgccccggacagcctggaggtgagcacgcgctgggccctggaccgcgagcagcgggagaagtacgagctggtggccgtgtgcaccgtgcacgccggcgcgcgcgaggaggtggtgatggtgcccttcccggtgaccgtgtacgacgaggacgactcggcgcccaccttccccgcgggcgtcgacaccgccagcgccgtggtggagttcaagcggaaggaggacaccgtggtggccacgctgcgtgtcttcgatgcagacgtggtacctgcatcaggggagctggtgaggcggtacacaagcacgctgctccccggggacacctgggcccagcagaccttccgggtggaacactggcccaacgagacctcggtccaggccaacggcagcttcgtgcgggcgaccgtacatgactataggctggttctcaaccggaacctctccatctcggagaaccgcaccatgcagctggcggtgctggtcaatgactcagacttccagggcccaggagcgggcgtcctcttgctccacttcaacgtgtcggtgctgccggtcagcctgcacctgcccagtacctactccctctccgtgagcaggagggctcgccgatttgcccagatcgggaaagtctgtgtggaaaactgccaggcattcagtggcatcaacgtccagtacaagctgcattcctctggtgccaactgcagcacgctaggggtggtcacctcagccgaggacacctcggggatcctgtttgtgaatgacaccaaggccctgcggcggcccaagtgtgccgaacttcactacatggtggtggccaccgaccagcagacctctaggcaggcccaggcccagctgcttgtaacagtggaggggtcatatgtggccgaggaggcgggctgccccctgtcctgtgcagtcagcaagagacggctggagtgtgaggagtgtggcggcctgggctccccaacaggcaggtgtgagtggaggcaaggagatggcaaagggatcaccaggaacttctccacctgctctcccagcaccaagacctgccccgacggccactgcgatgttgtggagacccaagacatcaacatttgccctcaggactgcctccggggcagcattgttgggggacacgagcctggggagccccgggggattaaagctggctatggcacctgcaactgcttccctgaggaggagaagtgcttctgcgagcccgaagacatccaggatccactgtgcgacgagctgtgccgcacggtgatcgcagccgctgtcctcttctccttcatcgtctcggtgctgctgtctgccttctgcatccactgctaccacaagtttgcccacaagccacccatctcctcagctgagatgaccttccggaggcccgcccaggccttcccggtcagctactcctcttccggtgcccgccggccctcgctggactccatggagaaccaggtctccgtggatgccttcaagatcctggaggatccaaagtgggaattccctcggaagaacttggttcttggaaaaactctaggagaaggcgaatttggaaaagtggtcaaggcaacggccttccatctgaaaggcagagcagggtacaccacggtggccgtgaagatgctgaaagagaacgcctccccgagtgagcttcgagacctgctgtcagagttcaacgtcctgaagcaggtcaaccacccacatgtcatcaaattgtatggggcctgcagccaggatggcccgctcctcctcatcgtggagtacgccaaatacggctccctgcggggcttcctccgcgagagccgcaaagtggggcctggctacctgggcagtggaggcagccgcaactccagctccctggaccacccggatgagcgggccctcaccatgggcgacctcatctcatttgcctggcagatctcacaggggatgcagtatctggccgagatgaagctcgttcatcgggacttggcagccagaaacatcctggtagctgaggggcggaagatgaagatttcggatttcggcttgtcccgagatgtttatgaagaggattcctacgtgaagaggagccagggtcggattccagttaaatggatggcaattgaatccctttttgatcatatctacaccacgcaaagtgatgtatggtcttttggtgtcctgctgtgggagatcgtgaccctagggggaaacccctatcctgggattcctcctgagcggctcttcaaccttctgaagaccggccaccggatggagaggccagacaactgcagcgaggagatgtaccgcctgatgctgcaatgctggaagcaggagccggacaaaaggccggtgtttgcggacatcagcaaagacctggagaagatgatggttaagaggagagactacttggaccttgcggcgtccactccatctgactccctgatttatgacgacggcctctcagaggaggagacaccgctggtggactgtaataatgcccccctccctcgagccctcccttccacatggattgaaaacaaactctatggcatgtcagacccgaactggcctggagagagtcctgtaccactcacgagagctgatggcactaacactgggtttccaagatatccaaatgatagtgtatatgctaactggatgctttcaccctcagcggcaaaattaatggacacgtttgatagttaacatttctttgtgaaaggtaatggactcacaaggggaagaaacatgctgagaatggaaagtctaccggccctttctttgtgaacgtcacattggccgagccgtgttcagttcccaggtggcagactcgtttttggtagtttgttttaacttccaaggtggttttacttctgatagccggtgattttccctcctagcagacatgccacaccgggtaagagctctgagtcttagtggttaagcattcctttctcttcagtgcccagcagcacccagtgttggtctgtgtccatcagtgaccaccaacattctgtgttcacatgtgtgggtccaacacttactacctggtgtatgaaattggacctgaactgttggatttttctagttgccgccaaacaaggcaaaaaaatttaaacatgaagcacacacacaaaaaaggcagtaggaaaaatgctggccctgatgacctgtccttattcagaatgagagactgcggggggggcctgggggtagtgtcaatgcccctccagggctggaggggaagaggggccccgaggatgggcctgggctcagcattcgagatcttgagaatgatttttttttaatcatgcaacctttccttaggaagacatttggttttcatcatgattaagatgattcctagatttagcacaatggagagattccatgccatctttactatgtggatggtggtatcagggaagagggctcacaagacacatttgtcccccgggcccaccacatcatcctcacgtgttcggtactgagcagccactacccctgatgagaacagtatgaagaaagggggctgttggagtcccagaattgctgacagcagaggctttgctgctgtgaatcccacctgccaccagcctgcagcacaccccacagccaagtagaggcgaaagcagtggctcatcctacctgttaggagcaggtagggcttgtactcactttaatttgaatcttatcaacttactcataaagggacaggctagctagctgtgttagaagtagcaatgacaatgaccaaggactgctacacctctgattacaattctgatgtgaaaaagatggtgtttggctcttatagagcctgtgtgaaaggcccatggatcagctcttcctgtgtttgtaatttaatgctgctacaagatgtttctgtttcttagattctgaccatgactcataagcttcttgtcattcttcattgcttgtttgtggtcacagatgcacaacactcctccagtcttgtgggggcagcttttgggaagtctcagcagctcttctggctgtgttgtcagcactgtaacttcgcagaaaagagtcggattaccaaaacactgcctgctcttcagacttaaagcactgataggacttaaaatagtctcattcaaatactgtattttatataggcatttcacaaaaacagcaaaattgtggcattttgtgaggccaaggcttggatgcgtgtgtaatagagccttgtggtgtgtgcgcacacacccagagggagagtttgaaaaatgcttattggacacgtaacctggctctaatttgggctgtttttcagatacactgtgataagttcttttacaaatatctatagacatggtaaacttttggttttcagatatgcttaatgatagtcttactaaatgcagaaataagaataaactttctcaaattattaaaaatgcctacacagtaagtgtgaattgctgcaacaggtttgttctcaggagggtaagaactccaggtctaaacagctgacccagtgatggggaatttatccttgaccaatttatccttgaccaataacctaattgtctattcctgagttataaaagtccccatccttattagctctactggaattttcatacacgtaaatgcagaagttactaagtattaagtattactgagtattaagtagtaatctgtcagttattaaaatttgtaaaatctatttatgaaaggtcattaaaccagatcatgttcctttttttgtaatcaaggtgactaagaaaatcagttgtgtaaataaaatcatgtatcataaaaaaaaaaaaaaaa

SEQ ID NO: 652 - DNA, 4174 bp, Homo sapiens
agtcccgcgaccgaagcagggcgcgcagcagcgctgagtgccccggaacgtgcgtcgcgcccccagtgtccgtcgcgtccgccgcgccccgggcggggatggggcggccagactgagcgccgcacccgccatccagacccgccggccctagccgcagtccctccagccgtggccccagcgcgcacgggcgatggcgaaggcgacgtccggtgccgcggggctgcgtctgctgttgctgctgctgctgccgctgctaggcaaagtggcattgggcctctacttctcgagggatgcttactgggagaagctgtatgtggaccaggcggccggcacgcccttgctgtacgtccatgccctgcgggacgcccctgaggaggtgcccagcttccgcctgggccagcatctctacggcacgtaccgcacacggctgcatgagaacaactggatctgcatccaggaggacaccggcctcctctaccttaaccggagcctggaccatagctcctgggagaagctcagtgtccgcaaccgcggctttcccctgctcaccgtctacctcaaggtcttcctgtcacccacatcccttcgtgagggcgagtgccagtggccaggctgtgcccgcgtatacttctccttcttcaacacctcctttccagcctgcagctccctcaagccccgggagctctgcttcccagagacaaggccctccttccgcattcgggagaaccgacccccaggcaccttccaccagttccgcctgctgcctgtgcagttcttgtgccccaacatcagcgtggcctacaggctcctggagggtgagggtctgcccttccgctgcgccccggacagcctggaggtgagcacgcgctgggccctggaccgcgagcagcgggagaagtacgagctggtggccgtgtgcaccgtgcacgccggcgcgcgcgaggaggtggtgatggtgcccttcccggtgaccgtgtacgacgaggacgactcggcgcccaccttccccgcgggcgtcgacaccgccagcgccgtggtggagttcaagcggaaggaggacaccgtggtggccacgctgcgtgtcttcgatgcagacgtggtacctgcatcaggggagctggtgaggcggtacacaagcacgctgctccccggggacacctgggcccagcagaccttccgggtggaacactggcccaacgagacctcggtccaggccaacggcagcttcgtgcgggcgaccgtacatgactataggctggttctcaaccggaacctctccatctcggagaaccgcaccatgcagctggcggtgctggtcaatgactcagacttccagggcccaggagcgggcgtcctcttgctccacttcaacgtgtcggtgctgccggtcagcctgcacctgcccagtacctactccctctccgtgagcaggagggctcgccgatttgcccagatcgggaaagtctgtgtggaaaactgccaggcattcagtggcatcaacgtccagtacaagctgcattcctctggtgccaactgcagcacgctaggggtggtcacctcagccgaggacacctcggggatcctgtttgtgaatgacaccaaggccctgcggcggcccaagtgtgccgaacttcactacatggtggtggccaccgaccagcagacctctaggcaggcccaggcccagctgcttgtaacagtggaggggtcatatgtggccgaggaggcgggctgccccctgtcctgtgcagtcagcaagagacggctggagtgtgaggagtgtggcggcctgggctccccaacaggcaggtgtgagtggaggcaaggagatggcaaagggatcaccaggaacttctccacctgctctcccagcaccaagacctgccccgacggccactgcgatgttgtggagacccaagacatcaacatttgccctcaggactgcctccggggcagcattgttgggggacacgagcctggggagccccgggggattaaagctggctatggcacctgcaactgcttccctgaggaggagaagtgcttctgcgagcccgaagacatccaggatccactgtgcgacgagctgtgccgcacggtgatcgcagccgctgtcctcttctccttcatcgtctcggtgctgctgtctgccttctgcatccactgctaccacaagtttgcccacaagccacccatctcctcagctgagatgaccttccggaggcccgcccaggccttcccggtcagctactcctcttccggtgcccgccggccctcgctggactccatggagaaccaggtctccgtggatgccttcaagatcctggaggatccaaagtgggaattccctcggaagaacttggttcttggaaaaactctaggagaaggcgaatttggaaaagtggtcaaggcaacggccttccatctgaaaggcagagcagggtacaccacggtggccgtgaagatgctgaaagagaacgcctccccgagtgagcttcgagacctgctgtcagagttcaacgtcctgaagcaggtcaaccacccacatgtcatcaaattgtatggggcctgcagccaggatggcccgctcctcctcatcgtggagtacgccaaatacggctccctgcggggcttcctccgcgagagccgcaaagtggggcctggctacctgggcagtggaggcagccgcaactccagctccctggaccacccggatgagcgggccctcaccatgggcgacctcatctcatttgcctggcagatctcacaggggatgcagtatctggccgagatgaagctcgttcatcgggacttggcagccagaaacatcctggtagctgaggggcggaagatgaagatttcggatttcggcttgtcccgagatgtttatgaagaggattcctacgtgaagaggagccagggtcggattccagttaaatggatggcaattgaatccctttttgatcatatctacaccacgcaaagtgatgtatggtcttttggtgtcctgctgtgggagatcgtgaccctagggggaaacccctatcctgggattcctcctgagcggctcttcaaccttctgaagaccggccaccggatggagaggccagacaactgcagcgaggagatgtaccgcctgatgctgcaatgctggaagcaggagccggacaaaaggccggtgtttgcggacatcagcaaagacctggagaagatgatggttaagaggagagactacttggaccttgcggcgtccactccatctgactccctgatttatgacgacggcctctcagaggaggagacaccgctggtggactgtaataatgcccccctccctcgagccctcccttccacatggattgaaaacaaactctatggtagaatttcccatgcatttactagattctagcaccgctgtcccctctgcactatccttcctctctgtgatgctttttaaaaatgtttctggtctgaacaaaaccaaagtctgctctgaacctttttatttgtaaatgtctgactttgcatccagtttacatttaggcattattgcaactatgtttttctaaaaggaagtgaaaataagtgtaattaccacattgcccagcaacttaggatggtagaggaaaaaacagatcagggcggaactctcaggggagaccaagaacaggttgaataaggcgcttctggggtgggaatcaagtcatagtacttctactttaactaagtggataaatatacaaatctggggaggtattcagttgagaaaggagccaccagcaccactcagcctgcactgggagcacagccaggttcccccagacccctcctgggcaggcaggtgcctctcagaggccacccggcactggcgagcagccactggccaagcctcagccccagtcccagccacatgtcctccatcaggggtagcgaggttgcaggagctggctggccctgggaggacgcacccccactgctgttttcacatcctttcccttacccaccttcaggacggttgtcacttatgaagtcagtgctaaagctggagcagttgctttttgaaagaacatggtctgtggtgctgtggtcttacaatggacagtaaatatggttcttgccaaaactccttcttttgtctttgattaaatactagaaatttaaaaaaaaaaaaaaa

SEQ ID NO: 653 - DNA, 1227 bp, Homo sapiens
gtttccggtgcaggtggggaaaatggcggtgtctacagtgttctcgacttcgtcgctgatgcttgctctgtcaaggcacagcctattgtctcctttgctcagtgtgacatcattcagacgcttctacagaggtgacagcccaacagattcccaaaaggacatgattgaaatccctttgcctccatggcaggagagaactgatgaatccatagaaaccaaaagagcccgcctgctctatgagagcagaaagaggggaatgttggaaaactgcattcttcttagtctttttgctaaagaacatctgcagcacatgacagaaaagcagctgaacctctatgaccgcctgattaacgagcctagtaatgactgggatatttactactgggccacagaagctaaaccagccccagaaatatttgaaaatgaagtcatggccctgctgagagactttgctaaaaacaaaaacaaagagcagagactgcgtgccccagatcttgagtacctctttgaaaagccacgttgagctgtgctccacggcctggcatgggggttcagtctgtggatggtaactacttatgatggacgttagccttgcttccggcttcttagatgcccagctgccctaccccagaccactggtcctgcctcaagtgatggacataaccctctcctaggacatacatgtaaatgcacaatgtgactcattctcatacttttttgttcagctctgagcctcaaaagtgatttgtcagcagcgctggcatgcaggctttgcctggctgctatctctagaggcaagtctgccacgagagggcactgcaggcgaagcagttgtgcttgctcattgcctcagcccaagtgtactcaaagaaaagaggcagccagctgtgcgtgctgtatggaaagcctcccgccctccctgcagctccccgccctcagtggcccagggctttgttgaagtggaactccccacttccaacctggtatggctccttctgcgaagggaagctgatcccagcctcctgagctgaatccttcaaaggcacagcaggcagaatgagggccacaggcaggagtggtgtgggcacactgcttaggagtcaacatcttcatcattgggctttctttaaaacgtgcactttgtaatttgaaagagaattattaaagcatactgaaaaaaggaaatttacaatttcccagccctcacaattaattttaaaaaaaaaa

SEQ ID NO: 654 - DNA, 1161 bp, Homo sapiens
acccgggaaaccggaagccgcctcccacttggttgctcgtacgcggctagtgggtcctcagtggatgtaggctgggcgccgcgatgttcgacgggacaccggcggagagcgacctcggggttaaggggtggggctgacgtcaggagccaagatggcggcggtggtcgccctctccttgaggcgccggttgccggccacaacccttggcggagcctgcctgcaggcctcccgaggagcccagacagctgcagccacagctccccgtatcaagaaatttgccatctatcgatgggacccagacaaggctggagacaaacctcatatgcagacttatgaagttgaccttaataaatgtggccccatggtattggatgctttaatcaagattaagaatgaagttgactctactttgaccttccgaagatcatgcagagaaggcatctgtggctcttgtgcaatgaacatcaatggaggcaacactctagcttgcacccgaaggattgacaccaacctcaataaggtctcaaaaatctaccctcttccacacatgtatgtgataaaggatcttgttcccgatttgagcaacttctatgcacagtacaaatccattgagccttatttgaagaagaaggatgaatctcaggaaggcaagcagcagtatctgcagtccatagaagagcgtgagaaactggacgggctctacgagtgcattctctgtgcctgctgtagcaccagctgccccagctactggtggaacggagacaaatatctggggcctgcagttcttatgcaggcctatcgctggatgattgactccagagatgacttcacagaggagcgcctggccaagctgcaggacccattctctctataccgctgccacaccatcatgaactgcacaaggacctgtcctaagggtctgaatccagggaaagctattgcagagatcaagaaaatgatggcaacctataaggagaagaaagcttcagtttaactgtttccatgctaaacatgatttataaccagctcagagctgaacataatttatatctaatttgagttcctttaaagatcttggttttccatgaatacagcatgtataataaaaattttaagaaataaatgttattctactttattaacaaaaaaaaaaaaaaaaaa

SEQ ID NO: 655 - DNA, 2858 bp, Homo sapiens
gcgtcacttccgtccagaccggaacccaagatggctgcgctgttgctgagacacgttggtcgtcattgcctccgagcccactttagccctcagctctgtatcagaaatgctgttcctttgggaaccacggccaaagaagagatggagcggttctggaataagaatataggttcaaaccgtcctctgtctccccacattactatctacagttggtctcttcccatggcgatgtccatctgccaccgtggcactggtattgctttgagtgcaggggtctctctttttggcatgtcggccctgttactccctgggaactttgagtcttatttggaacttgtgaagtccctgtgtctggggccagcactgatccacacagctaagtttgcacttgtcttccctctcatgtatcatacctggaatgggatccgacacttgatgtgggacctaggaaaaggcctgaagattccccagctataccagtctggagtggttgtcctggttcttactgtgttgtcctctatggggctggcagccatgtgaagaaaggaggctcccagcatcatcttcctacacattattacattcacccatctttctgtttgtcattcttatctccagcctgggaaaagttctccttatttgtttagatccttttgtattttcagatctccttggagcagtagagtacctggtagaccataatagtggaaaagggtctagttttccccttgtttctaaagatgaggtggctgcaaaaactccccttttttgcccacagcttgcctactctcggcctagaagcagttattctctctccatattgggctttgatttgtgctgagggtcagcttttggctccttcttcctgagacagtggaaacaatgccagctctgtggcttctgccctggggatgggccgggttggggggtgggttggtgaggctttgggtgccactgcctgtgggttgctggcttaaaggacaattctcttcattggtgagagcccaggccattaacacctacacagtgttattgaaagaagagaggtgggggtggaggggaattagtctgtcccagctagagggagataaagagggctagttagttcttggagcagctgcttttgaggagaaaatatatagctttggacacgaggaagatctagaaaattatcattgaacatattaatggttatttctttttcttggatttccagaaaagcctcttaattttatgctttctcatcgaagtaatgtaccctttttttctgaaactgaattaaatactcattttatctttgactctccttgaaatctagagaaaccaagaaaatggctgttgggaaggaaccaatttcctcctcttccctcgggtctcaggcatttacatcctccctctccccgcaatctgacctttaccaggagggaaacagttctcctacatctcatcattggaaaagttttcagggaatcagatagaacttagccagagatttaaatatcacagaaaagcctcagagaaggaaggagaaaaagaaaagaagtgacgcatgtagagtgcttttgggttataggcaccaaaatcccattaaggactgattataagcttcatggtacagttcagcaaattatgattcattgaggggcacagaggaccagtgttggtgacagctaggggatgatgacctgaggttataggcttggggtgaatgaagcatagagtttttttttaaaaaagaagggattgttgaaaacctggcaaaaatgtataatttaatgagaaaacttgctgcttttaaaatccatataggccaggctttagcaggcatgctgttttgatagtttttgggaactctggaataagagacttatctcatctgtcacttcgagttgttggccagccagttaaagctgtgggtcgaagaggggaaatgttaactggctggtgtcaattggataggaagaccttagttaaggtggggacccgctgttttaacagtcttcattcagggtcccaaatagtatttggctttaagtaatgattggttttccctttttactagaggggccctgggaagtccttgtacctttcctccattttaaaccagctgttctctactttgtccttggaatgagggacaagtgatcatgacagaacactttgtcattgggactgggaaaggtttggcaagggcattaaatttaacagccagtgccaggaaaatataaaatggggtcaatgataaacagctgttagaggctggaaaatgggtagggcagttgaattttttggtggtttcgtaccatttgggtgattgaagcatggtagtgggtgggtggggggtgtgacagagcatcatgtttgttattctgccttaaatttctacttactgtctttttcttctctgtcttccaatcactttaatatcttcaattttcaaactatatttgtacttgggcttagatagaaagtcttacacaagcatagtatcttctactttggttttccctaccttttcttccccaccttctccaaacacacatatacatactctactcaattctatttctgattttgtagttgttagttgtccatgctcaggataaaaaatgagtgggtagggttgagggactggttctttgaggttctgccctttttccatgattcagaccaactttctcttggtcatttctggagtataactgactcaattcttgtaaaaatgtgttccacccaaaccactgtatgttcttttccctactttattttctcctaccttccttctcctaattgtgttacaagaggcagccatagcaagaatggaaaatccagatcagtaaaagattcaacaaaaaaaa

SEQ ID NO: 656 - DNA, 2694 bp, Homo sapiens
gcgtcacttccgtccagaccggaacccaagatggctgcgctgttgctgagacacgttggtcgtcattgcctccgagcccactttagccctcagctctgtatcagaaatgctgttcctttgggaaccacggccaaagaagagatggagcggttctggaataagaatataggttcaaaccgtcctctgtctccccacattactatctacagttggtctcttcccatggcgatgtccatctgccaccgtggcactggtattgctttgagtgcagatgtgggacctaggaaaaggcctgaagattccccagctataccagtctggagtggttgtcctggttcttactgtgttgtcctctatggggctggcagccatgtgaagaaaggaggctcccagcatcatcttcctacacattattacattcacccatctttctgtttgtcattcttatctccagcctgggaaaagttctccttatttgtttagatccttttgtattttcagatctccttggagcagtagagtacctggtagaccataatagtggaaaagggtctagttttccccttgtttctaaagatgaggtggctgcaaaaactccccttttttgcccacagcttgcctactctcggcctagaagcagttattctctctccatattgggctttgatttgtgctgagggtcagcttttggctccttcttcctgagacagtggaaacaatgccagctctgtggcttctgccctggggatgggccgggttggggggtgggttggtgaggctttgggtgccactgcctgtgggttgctggcttaaaggacaattctcttcattggtgagagcccaggccattaacacctacacagtgttattgaaagaagagaggtgggggtggaggggaattagtctgtcccagctagagggagataaagagggctagttagttcttggagcagctgcttttgaggagaaaatatatagctttggacacgaggaagatctagaaaattatcattgaacatattaatggttatttctttttcttggatttccagaaaagcctcttaattttatgctttctcatcgaagtaatgtaccctttttttctgaaactgaattaaatactcattttatctttgactctccttgaaatctagagaaaccaagaaaatggctgttgggaaggaaccaatttcctcctcttccctcgggtctcaggcatttacatcctccctctccccgcaatctgacctttaccaggagggaaacagttctcctacatctcatcattggaaaagttttcagggaatcagatagaacttagccagagatttaaatatcacagaaaagcctcagagaaggaaggagaaaaagaaaagaagtgacgcatgtagagtgcttttgggttataggcaccaaaatcccattaaggactgattataagcttcatggtacagttcagcaaattatgattcattgaggggcacagaggaccagtgttggtgacagctaggggatgatgacctgaggttataggcttggggtgaatgaagcatagagtttttttttaaaaaagaagggattgttgaaaacctggcaaaaatgtataatttaatgagaaaacttgctgcttttaaaatccatataggccaggctttagcaggcatgctgttttgatagtttttgggaactctggaataagagacttatctcatctgtcacttcgagttgttggccagccagttaaagctgtgggtcgaagaggggaaatgttaactggctggtgtcaattggataggaagaccttagttaaggtggggacccgctgttttaacagtcttcattcagggtcccaaatagtatttggctttaagtaatgattggttttccctttttactagaggggccctgggaagtccttgtacctttcctccattttaaaccagctgttctctactttgtccttggaatgagggacaagtgatcatgacagaacactttgtcattgggactgggaaaggtttggcaagggcattaaatttaacagccagtgccaggaaaatataaaatggggtcaatgataaacagctgttagaggctggaaaatgggtagggcagttgaattttttggtggtttcgtaccatttgggtgattgaagcatggtagtgggtgggtggggggtgtgacagagcatcatgtttgttattctgccttaaatttctacttactgtctttttcttctctgtcttccaatcactttaatatcttcaattttcaaactatatttgtacttgggcttagatagaaagtcttacacaagcatagtatcttctactttggttttccctaccttttcttccccaccttctccaaacacacatatacatactctactcaattctatttctgattttgtagttgttagttgtccatgctcaggataaaaaatgagtgggtagggttgagggactggttctttgaggttctgccctttttccatgattcagaccaactttctcttggtcatttctggagtataactgactcaattcttgtaaaaatgtgttccacccaaaccactgtatgttcttttccctactttattttctcctaccttccttctcctaattgtgttacaagaggcagccatagcaagaatggaaaatccagatcagtaaaagattcaacaaaaaaaa

SEQ ID NO: 657 - DNA, 2756 bp, Homo sapiens
gcgtcacttccgtccagaccggaacccaagatggctgcgctgttgctgagacacgttggtcgtcattgcctccgagcccactttagccctcagctctgtatcagaaattggtctcttcccatggcgatgtccatctgccaccgtggcactggtattgctttgagtgcaggggtctctctttttggcatgtcggccctgttactccctgggaactttgagtcttatttggaacttgtgaagtccctgtgtctggggccagcactgatccacacagctaagtttgcacttgtcttccctctcatgtatcatacctggaatgggatccgacacttgatgtgggacctaggaaaaggcctgaagattccccagctataccagtctggagtggttgtcctggttcttactgtgttgtcctctatggggctggcagccatgtgaagaaaggaggctcccagcatcatcttcctacacattattacattcacccatctttctgtttgtcattcttatctccagcctgggaaaagttctccttatttgtttagatccttttgtattttcagatctccttggagcagtagagtacctggtagaccataatagtggaaaagggtctagttttccccttgtttctaaagatgaggtggctgcaaaaactccccttttttgcccacagcttgcctactctcggcctagaagcagttattctctctccatattgggctttgatttgtgctgagggtcagcttttggctccttcttcctgagacagtggaaacaatgccagctctgtggcttctgccctggggatgggccgggttggggggtgggttggtgaggctttgggtgccactgcctgtgggttgctggcttaaaggacaattctcttcattggtgagagcccaggccattaacacctacacagtgttattgaaagaagagaggtgggggtggaggggaattagtctgtcccagctagagggagataaagagggctagttagttcttggagcagctgcttttgaggagaaaatatatagctttggacacgaggaagatctagaaaattatcattgaacatattaatggttatttctttttcttggatttccagaaaagcctcttaattttatgctttctcatcgaagtaatgtaccctttttttctgaaactgaattaaatactcattttatctttgactctccttgaaatctagagaaaccaagaaaatggctgttgggaaggaaccaatttcctcctcttccctcgggtctcaggcatttacatcctccctctccccgcaatctgacctttaccaggagggaaacagttctcctacatctcatcattggaaaagttttcagggaatcagatagaacttagccagagatttaaatatcacagaaaagcctcagagaaggaaggagaaaaagaaaagaagtgacgcatgtagagtgcttttgggttataggcaccaaaatcccattaaggactgattataagcttcatggtacagttcagcaaattatgattcattgaggggcacagaggaccagtgttggtgacagctaggggatgatgacctgaggttataggcttggggtgaatgaagcatagagtttttttttaaaaaagaagggattgttgaaaacctggcaaaaatgtataatttaatgagaaaacttgctgcttttaaaatccatataggccaggctttagcaggcatgctgttttgatagtttttgggaactctggaataagagacttatctcatctgtcacttcgagttgttggccagccagttaaagctgtgggtcgaagaggggaaatgttaactggctggtgtcaattggataggaagaccttagttaaggtggggacccgctgttttaacagtcttcattcagggtcccaaatagtatttggctttaagtaatgattggttttccctttttactagaggggccctgggaagtccttgtacctttcctccattttaaaccagctgttctctactttgtccttggaatgagggacaagtgatcatgacagaacactttgtcattgggactgggaaaggtttggcaagggcattaaatttaacagccagtgccaggaaaatataaaatggggtcaatgataaacagctgttagaggctggaaaatgggtagggcagttgaattttttggtggtttcgtaccatttgggtgattgaagcatggtagtgggtgggtggggggtgtgacagagcatcatgtttgttattctgccttaaatttctacttactgtctttttcttctctgtcttccaatcactttaatatcttcaattttcaaactatatttgtacttgggcttagatagaaagtcttacacaagcatagtatcttctactttggttttccctaccttttcttccccaccttctccaaacacacatatacatactctactcaattctatttctgattttgtagttgttagttgtccatgctcaggataaaaaatgagtgggtagggttgagggactggttctttgaggttctgccctttttccatgattcagaccaactttctcttggtcatttctggagtataactgactcaattcttgtaaaaatgtgttccacccaaaccactgtatgttcttttccctactttattttctcctaccttccttctcctaattgtgttacaagaggcagccatagcaagaatggaaaatccagatcagtaaaagattcaacaaaaaaaa

SEQ ID NO: 658 - DNA, 2699 bp, Homo sapiens
gcgtcacttccgtccagaccggaacccaagatggctgcgctgttgctgagttggtctcttcccatggcgatgtccatctgccaccgtggcactggtattgctttgagtgcaggggtctctctttttggcatgtcggccctgttactccctgggaactttgagtcttatttggaacttgtgaagtccctgtgtctggggccagcactgatccacacagctaagtttgcacttgtcttccctctcatgtatcatacctggaatgggatccgacacttgatgtgggacctaggaaaaggcctgaagattccccagctataccagtctggagtggttgtcctggttcttactgtgttgtcctctatggggctggcagccatgtgaagaaaggaggctcccagcatcatcttcctacacattattacattcacccatctttctgtttgtcattcttatctccagcctgggaaaagttctccttatttgtttagatccttttgtattttcagatctccttggagcagtagagtacctggtagaccataatagtggaaaagggtctagttttccccttgtttctaaagatgaggtggctgcaaaaactccccttttttgcccacagcttgcctactctcggcctagaagcagttattctctctccatattgggctttgatttgtgctgagggtcagcttttggctccttcttcctgagacagtggaaacaatgccagctctgtggcttctgccctggggatgggccgggttggggggtgggttggtgaggctttgggtgccactgcctgtgggttgctggcttaaaggacaattctcttcattggtgagagcccaggccattaacacctacacagtgttattgaaagaagagaggtgggggtggaggggaattagtctgtcccagctagagggagataaagagggctagttagttcttggagcagctgcttttgaggagaaaatatatagctttggacacgaggaagatctagaaaattatcattgaacatattaatggttatttctttttcttggatttccagaaaagcctcttaattttatgctttctcatcgaagtaatgtaccctttttttctgaaactgaattaaatactcattttatctttgactctccttgaaatctagagaaaccaagaaaatggctgttgggaaggaaccaatttcctcctcttccctcgggtctcaggcatttacatcctccctctccccgcaatctgacctttaccaggagggaaacagttctcctacatctcatcattggaaaagttttcagggaatcagatagaacttagccagagatttaaatatcacagaaaagcctcagagaaggaaggagaaaaagaaaagaagtgacgcatgtagagtgcttttgggttataggcaccaaaatcccattaaggactgattataagcttcatggtacagttcagcaaattatgattcattgaggggcacagaggaccagtgttggtgacagctaggggatgatgacctgaggttataggcttggggtgaatgaagcatagagtttttttttaaaaaagaagggattgttgaaaacctggcaaaaatgtataatttaatgagaaaacttgctgcttttaaaatccatataggccaggctttagcaggcatgctgttttgatagtttttgggaactctggaataagagacttatctcatctgtcacttcgagttgttggccagccagttaaagctgtgggtcgaagaggggaaatgttaactggctggtgtcaattggataggaagaccttagttaaggtggggacccgctgttttaacagtcttcattcagggtcccaaatagtatttggctttaagtaatgattggttttccctttttactagaggggccctgggaagtccttgtacctttcctccattttaaaccagctgttctctactttgtccttggaatgagggacaagtgatcatgacagaacactttgtcattgggactgggaaaggtttggcaagggcattaaatttaacagccagtgccaggaaaatataaaatggggtcaatgataaacagctgttagaggctggaaaatgggtagggcagttgaattttttggtggtttcgtaccatttgggtgattgaagcatggtagtgggtgggtggggggtgtgacagagcatcatgtttgttattctgccttaaatttctacttactgtctttttcttctctgtcttccaatcactttaatatcttcaattttcaaactatatttgtacttgggcttagatagaaagtcttacacaagcatagtatcttctactttggttttccctaccttttcttccccaccttctccaaacacacatatacatactctactcaattctatttctgattttgtagttgttagttgtccatgctcaggataaaaaatgagtgggtagggttgagggactggttctttgaggttctgccctttttccatgattcagaccaactttctcttggtcatttctggagtataactgactcaattcttgtaaaaatgtgttccacccaaaccactgtatgttcttttccctactttattttctcctaccttccttctcctaattgtgttacaagaggcagccatagcaagaatggaaaatccagatcagtaaaagattcaacaaaaaaaa

SEQ ID NO: 659 - DNA, 1382 bp, Homo sapiens
gtgggaattgtcgcctaagtggttccgggttggtggatgaccttgagccctcaggaacgagatggcggttctctggaggctgagtgccgtttgcggtgccctaggaggccgagctctgttgcttcgaactccagtggtcagacctgctcatatctcagcatttcttcaggaccgacctatcccagaatggtgtggagtgcagcacatacacttgtcaccgagccaccattctggctccaaggctgcatctctccactggactagcgagagggttgtcagtgttttgctcctgggtctgcttccggctgcttatttgaatccttgctctgcgatggactattccctggctgcagccctcactcttcatggtcactggggccttggacaagttgttactgactatgttcatggggatgccttgcagaaagctgccaaggcagggcttttggcactttcagctttaacctttgctgggctttgctatttcaactatcacgatgtgggcatctgcaaagctgttgccatgctgtggaagctctgacctttttgacttcatactttgaagaattgatgtatgcctctttgcctctgctttgtcatgccattaagctcacaataaggaagaaataacagataagtccattggtggacagccttcttctcttaatcacaagattattttcagaatttaatctttgaggaaaaggtttgagaggaattatatctaagttgtgagactgagttctatattctggtgagttaatggggttgcctcccagcttcttataagactcacagtataactaaacatgatatatcagcttttgcctttcaatttatcaatctcttaaagagaatccaactttattacgattagtatatgatcaaacttccatatttgccttgggaataatggacaaagggaaatactcttaattcatgaataaaaactttgcagaaaattagacagtgtttaattttcgaaaacttccctctctagacagtagataccacctactgatggttacatatactagggaaattttaaaattaggaaatgctgatagctcatattataaatttctaaatcctaggaagaaacgcttggagtgcttctgaatatacagaagttccatttaagggcaagtttccctgtagatgtatcaaaatactaccaactgtaaattgagatttaattcccaaatgtattctacttgttctaaaacaatctgtccacaaatataaaactataagtaataaattgttattttcgcacaatgggaatctctaatgtgaaaatgtattctatgaaaataatttttttaaataaaatgttatataataaaagtgtcttctatgcttttaaaaaaaaaaaaaaaaaa

SEQ ID NO: 660 - DNA, 8770 bp, Homo sapiens
atgctcagtggcttctcgacaagttggcagcaacaacacggccctggtcgtcgtcgccgctgcggtaacggagcggtttgggtggcggagcctgcgttcgcgccttcccgctctcctcgggaggcccttcctgctctcccctaggctccgcggccgcccagggggtgggagcgggtgaggggagccaggcgcccagcgagagaggccccccgccgcagggcggcccgggagctcgaggcggtccggcccgcgcgggcagcggcgcggcgctgaggaggggcggcctggccgggacgcctcggggcgggggccgaggagctctccgggccgccggggaaagctacgggcccggtgcgtccgcggaccagcagcgcgggagagcggactcccctcgccaccgcccgagcccaggttatcctgaatacatgtctaacaattttccttgcaacgttagctgttgtttttcactgtttccaaaggatcaaaattgcttcagaaattggagacatatttgatttaaaaggaaaaacttgaacaaatggacaatatgtctattacgaatacaccaacaagtaatgatgcctgtctgagcattgtgcatagtttgatgtgccatagacaaggtggagagagtgaaacatttgcaaaaagagcaattgaaagtttggtaaagaagctgaaggagaaaaaagatgaattggattctttaataacagctataactacaaatggagctcatcctagtaaatgtgttaccatacagagaacattggatgggaggcttcaggtggctggtcggaaaggatttcctcatgtgatctatgcccgtctctggaggtggcctgatcttcacaaaaatgaactaaaacatgttaaatattgtcagtatgcgtttgacttaaaatgtgatagtgtctgtgtgaatccatatcactacgaacgagttgtatcacctggaattgatctctcaggattaacactgcagagtaatgctccatcaagtatgatggtgaaggatgaatatgtgcatgactttgagggacagccatcgttgtccactgaaggacattcaattcaaaccatccagcatccaccaagtaatcgtgcatcgacagagacatacagcaccccagctctgttagccccatctgagtctaatgctaccagcactgccaactttcccaacattcctgtggcttccacaagtcagcctgccagtatactggggggcagccatagtgaaggactgttgcagatagcatcagggcctcagccaggacagcagcagaatggatttactggtcagccagctacttaccatcataacagcactaccacctggactggaagtaggactgcaccatacacacctaatttgcctcaccaccaaaacggccatcttcagcaccacccgcctatgccgccccatcccggacattactggcctgttcacaatgagcttgcattccagcctcccatttccaatcatcctgctcctgagtattggtgttccattgcttactttgaaatggatgttcaggtaggagagacatttaaggttccttcaagctgccctattgttactgttgatggatacgtggacccttctggaggagatcgcttttgtttgggtcaactctccaatgtccacaggacagaagccattgagagagcaaggttgcacataggcaaaggtgtgcagttggaatgtaaaggtgaaggtgatgtttgggtcaggtgccttagtgaccacgcggtctttgtacagagttactacttagacagagaagctgggcgtgcacctggagatgctgttcataagatctacccaagtgcatatataaaggtctttgatttgcgtcagtgtcatcgacagatgcagcagcaggcggctactgcacaagctgcagcagctgcccaggcagcagccgtggcaggaaacatccctggcccaggatcagtaggtggaatagctccagctatcagtctgtcagctgctgctggaattggtgttgatgaccttcgtcgcttatgcatactcaggatgagttttgtgaaaggctggggaccggattacccaagacagagcatcaaagaaacaccttgctggattgaaattcacttacaccgggccctccagctcctagacgaagtacttcataccatgccgattgcagacccacaacctttagactgaggtcttttaccgttggggcccttaaccttatcaggatggtggactacaaaatacaatcctgtttataatctgaagatatatttcacttttgttctgctttatcttttcataaagggttgaaaatgtgtttgctgccttgctcctagcagacagaaactggattaaaacaattttttttttcctcttcagaacttgtcaggcatggctcagagcttgaagattaggagaaacacattcttattaattcttcacctgttatgtatgaaggaatcattccagtgctagaaaatttagccctttaaaacgtcttagagccttttatctgcagaacatcgatatgtatatcattctacagaataatccagtattgctgattttaaaggcagagaagttctcaaagttaattcacctatgttattttgtgtacaagttgttattgttgaacatacttcaaaaataatgtgccatgtgggtgagttaattttaccaagagtaactttactctgtgtttaaaaagtaagttaataatgtattgtaatctttcatccaaaatattttttgcaagttatattagtgaagatggtttcaattcagattgtcttgcaacttcagttttatttttgccaaggcaaaaaactcttaatctgtgtgtatattgagaatcccttaaaattaccagacaaaaaaatttaaaattacgtttgttattcctagtggatgactgttgatgaagtatacttttcccctgttaaacagtagttgtattcttctgtatttctaggcacaaggttggttgctaagaagcctataagaggaatttcttttccttcattcatagggaaaggttttgtattttttaaaacactaaaagcagcgtcactctacctaatgtctcactgttctgcaaaggtggcaatgcttaaactaaataatgaataaactgaatattttggaaactgctaaattctatgttaaatactgtgcagaataatggaaacattacagttcataataggtagtttggatatttttgtacttgatttgatgtgactttttttggtataatgtttaaatcatgtatgttatgatattgtttaaaattcagtttttgtatcttggggcaagactgcaaacttttttatatcttttggttattctaagccctttgccatcaatgatcatatcaattggcagtgactttgtatagagaatttaagtagaaaagttgcagatgtattgactgtaccacagacacaatatgtatgctttttacctagctggtagcataaataaaactgaatctcaacatacaaagttgaattctaggtttgatttttaagattttttttttcttttgcacttttgagtccaatctcagtgatgaggtaccttctactaaatgacaggcaacagccagttctattgggcagctttgtttttttccctcacactctaccgggacttccccatggacattgtgtatcatgtgtagagttggttttttttttttttaatttttattttactatagcagaaatagacctgattatctacaagatgataaatagattgtctacaggataaatagtatgaaataaaatcaaggattatctttcagatgtgtttacttttgcctggagaacttttagctatagaaacacttgtgtgatgatagtcctccttatatcacctggaatgaacacagcttctactgccttgctcagaaggtcttttaaatagaccatcctagaaaccactgagtttgcttatttctgtgatttaaacatagatcttgatccaagctacatgacttttgtctttaaataacttatctaccacctcatttgtactcttgattacttacaaattctttcagtaaacacctaattttcttctgtaaaagtttggtgatttaagttttattggcagttttataaaaagacatcttctctagaaattgctaactttaggtccattttactgtgaatgaggaataggagtgagttttagaataacagatttttaaaaatccagatgatttgattaaaaccttaatcatacattgacataattcattgcttcttttttttgagatatggagtcttgctgtgttgcccaggcaggagtgcagtggtatgatctcagctcactgcaacctctgcctcccgggttcaactgattctcctgcctcagcctccctggtagctaggattacaggtgcccgccaccatgcctggctaacttttgtagttttagtagagacggggttttgcctgttggccaggctggtcttgaactcctgacctcaagtgatccatccaccttggcctcccaaagtgctgggattacgggcgtgagccactgtccctggcctcattgttcccttttctactttaaggaaagttttcatgtttaatcatctggggaaagtatgtgaaaaatatttgttaagaagtatctctttggagccaagccacctgtcttggtttctttctactaagagccataaagtatagaaatacttctagttgttaagtgcttatatttgtacctagatttagtcacacgcttttgagaaaacatctagtatgttatgatcagctattcctgagagcttggttgttaatctatatttctatttcttagtggtagtcatctttgatgaataagactaaagattctcacaggtttaaaattttatgtctactttaagggtaaaattatgaggttatggttctgggtgggttttctctagctaattcatatctcaaagagtctcaaaatgttgaatttcagtgcaagctgaatgagagatgagccatgtacacccaccgtaagacctcattccatgtttgtccagtgcctttcagtgcattatcaaagggaatccttcatggtgttgcctttattttccggggagtagatcgtgggatatagtctatctcatttttaatagtttaccgcccctggtatacaaagataatgacaataaatcactgccatataaccttgctttttccagaaacatggctgttttgtattgctgtaaccactaaataggttgcctataccattcctcctgtgaacagtgcagatttacaggttgcatggtctggcttaaggagagccatacttgagacatgtgagtaaactgaactcatattagctgtgctgcatttcagacttaaaatccatttttgtggggcagggtgtggtgtgtaaaggggggtgtttgtaatacaagttgaaggcaaaataaaatgtcctgtctcccagatgatatacatcttattatttttaaagtttattgctaattgtaggaaggtgagttgcaggtatctttgactatggtcatctggggaaggaaaattttacattttactattaatgctccttaagtgtctatggaggttaaagaataaaatggtaaatgtttctgtgcctggtttgatggtaactggttaatagttactcaccattttatgcagagtcacattagttcacaccctttctgagagccttttgggagaagcagttttattctctgagtggaacagagttctttttgttgataatttctagtttgctcccttcgttattgccaactttactggcattttatttaatgatagcagattgggaaaatggcaaatttaggttacggaggtaaatgagtatatgaaagcaattacctctaaagccagttaacaattattttgtaggtggggtacactcagcttaaagtaatgcatttttttttcccgtaaaggcagaatccatcttgttgcagatagctatctaaataatctcatatcctcttttgcaaagactacagagaataggctatgacaatcttgttcaagcctttccatttttttccctgataactaagtaatttctttgaacataccaagaagtatgtaaaaagtccatggccttattcatccacaaagtggcatcctaggcccagccttatccctagcagttgtcccagtgctgctaggttgcttatcttgtttatctggaatcactgtggagtgaaattttccacatcatccagaattgccttatttaagaagtaaaacgttttaatttttagcctttttttggtggagttatttaatatgtatatcagaggatatactagatggtaacatttctttctgtgcttggctatctttgtggacttcaggggcttctaaaacagacaggactgtgttgcctttactaaatggtctgagacagctatggttttgaatttttagttttttttttttaacccacttcccctcctggtctcttccctctctgataattaccattcatatgtgagtgttagtgtgcctccttttagcattttcttcttctctttctgattcttcatttctgactgcctaggcaaggaaaccagataaccaaacttactagaacgttctttaaaacacaagtacaaactctgggacaggacccaagacactttcctgtgaagtgctgaaaaagacctcattgtattggcatttgatatcagtttgatgtagcttagagtgcttcctgattcttgctgagtttcaggtagttgagatagagagaagtgagtcatattcatattttcccccttagaataatattttgaaaggtttcattgcttccacttgaatgctgctcttacaaaaactggggttacaagggttactaaattagcatcagtagccagaggcaataccgttgtctggaggacaccagcaaacaacacacaacaaagcaaaacaaaccttgggaaactaaggccatttgttttgttttggtgtcccctttgaagccctgccttctggccttactcctgtacagatatttttgacctataggtgcctttatgagaattgagggtctgacatcctgccccaaggagtagctaaagtaattgctagtgttttcagggattttaacatcagactggaatgaatgaatgaaactttttgtcctttttttttctgtttttttttttctaatgtagtaaggactaaggaaaacctttggtgaagacaatcatttctctctgttgatgtggatacttttcacaccgtttatttaaatgctttctcaataggtccagagccagtgttcttgttcaacctgaaagtaatggctctgggttgggccagacagttgcactctctagtttgccctctgccacaaatttgatgtgtgacctttgggcaagtcatttatcttctctgggccttagttgcctcatctgtaaaatgagggagttggagtagattaattattccagctctgaaattctaagtgaccttggctaccttgcagcagttttggatttcttccttatctttgttctgctgtttgagggggctttttacttatttccatgttattcaaaggagactaggcttgatattttattactgttcttttatggacaaaaggttacatagtatgcccttaagacttaattttaaccaaaggcctagcaccaccttaggggctgcaataaacacttaacgcgcgtgcgcacgcgcgcgcgcacacacacacacacacacacacacacacacaggtcagagtttaaggctttcgagtcatgacattctagcttttgaattgcgtgcacacacacacgcacgcacacactctggtcagagtttattaaggctttcgagtcatgacattatagcttttgagttggtgtgtgtgacaccaccctcctaagtggtgtgtgcttgtaattttttttttcagtgaaaatggattgaaaacctgttgttaatgcttagtgatattatgctcaaaacaaggaaattcccttgaaccgtgtcaattaaactggtttatatgactcaagaaaacaataccagtagatgattattaactttattcttggctctttttaggtccattttgattaagtgacttttggctggatcattcagagctctcttctagcctacccttggatgagtacaattaatgaaattcatattttcaaggacctgggagccttccttggggctgggttgagggtggggggttggggagtcctggtagaggccagctttgtggtagctggagaggaagggatgaaaccagctgctgttgcaaaggctgcttgtcattgatagaaggactcacgggcttggattgattaagactaaacatggagttggcaaactttcttcaagtattgagttctgttcaatgcattggacatgtgatttaagggaaaagtgtgaatgcttatagatgatgaaaacctggtgggctgcagagcccagtttagaagaagtgagttgggggttggggacagatttggtggtggtatttcccaactgtttcctcccctaaattcagaggaatgcagctatgccagaagccagagaagagccactcgtagcttctgctttggggacaactggtcagttgaaagtcccaggagttcctttgtggctttctgtatacttttgcctggttaaagtctgtggctaaaaaatagtcgaacctttcttgagaactctgtaacaaagtatgtttttgattaaaagagaaagccaacta

SEQ ID NO: 661 - DNA, 1500 bp, Homo sapiens
agaacaccagtttggagctttaggggctttctggtcaaagagggaatggcccaggcggtgatgtggaggatagaatgaagcactgagtatgagtggcgaaggcgtacggtgggtgtagagattttctgggcgacgtgacctaagaaatgactttagaactggctaatcattggttttggagggactaaaagtagttcctggttggtgaaaataaatcattaatgcgttttaaatgaaaaagaaatgcatgcgtcttgtaaaaaatgtgaaataaaagaggcataaagtcaaaagcagagcctatgccttcccccaccaaacaaacaggtaacctagttaacaggtgtgtcgtaggattcgaagttcgcctccagctccgagagtgcgcctacatctcttccaacaaaatccactcacacttgcaacgcctggcaaggctcttcaatatgtgattccttgactgtcctgtgcgtctctcgagtgtaaacacctctggggctcgtgattcggggctgccagaaagagaaggaaggtgccgccagcgtctgtttcttcccgaagtgaactcctacaacctagccaccttctccccagagctgtcgactggctgttgaaggccaatttttgtgcctacgcaggtcctcaacacagaacaaaacaaaaaaacaacaaaggccgggctaatagctatttataaacacttactggacgcccactctacgccgagctctcccgcgctccttggatacttttttgcaacgagatgccaatttccccggcgaccactccctcaaacaggccttcgcctccgcccgcgctgaggcccaggcccaggtccagattcagagccgcccgccggctggcgctgccctgtaggcgcctgcgcagagcgaccctccccgtcactcggagcgggaggcgggggcagccgggagaaaggaaagctgcgggggaaaagggccaaaccctgaaattacccggatgtggtccccgcgcgcgcatgctcagtggcttctcgacaagttggcagcaacaacacggccctggtcgtcgtcgccgctgcggtaacggagcggtttgggtggcggagcctgcgttcgcgccttcccgctctcctcgggaggcccttcctgctctcccctaggctccgcggccgcccagggggtgggagcgggtgaggggagccaggcgcccagcgagagaggccccccgccgcagggcggcccgggagctcgaggcggtccggcccgcgcgggcagcggcgcggcgctgaggaggggcggcctggccgggacgcctcggggcgggggccgaggagctctccgggccgccggggaaagctacgggcccggtgcgtccgcggaccagcagcgcgggagagcggactcccctcgccaccgcccgagcccaggtaaccgcgccatgtcccctccccttcccccggccgggcccgcgcaccccgcctgtggcttccccgccccggggcgggctcccgacgac

SEQ ID NO: 662 - DNA, 1411 bp, Homo sapiens
cgtgattcggggctgccagaaagagaaggaaggtgccgccagcgtctgtttcttcccgaagtgaactcctacaacctagccaccttctccccagagctgtcgactggctgttgaaggccaatttttgtgcctacgcaggtcctcaacacagaacaaaacaaaaaaacaacaaaggccgggctaatagctatttataaacacttactggacgcccactctacgccgagctctcccgcgctccttggatacttttttgcaacgagatgccaatttccccggcgaccactccctcaaacaggccttcgcctccgcccgcgctgaggcccaggcccaggtccagattcagagccgcccgccggctggcgctgccctgtaggcgcctgcgcagagcgaccctccccgtcactcggagcgggaggcgggggcagccgggagaaaggaaagctgcgggggaaaagggccaaaccctgaaattacccggatgtggtccccgcgcgcgcatgctcagtggcttctcgacaagttggcagcaacaacacggccctggtcgtcgtcgccgctgcggtaacggagcggtttgggtggcggagcctgcgttcgcgccttcccgctctcctcgggaggcccttcctgctctcccctaggctccgcggccgcccagggggtgggagcgggtgaggggagccaggcgcccagcgagagaggccccccgccgcagggcggcccgggagctcgaggcggtccggcccgcgcgggcagcggcgcggcgctgaggaggggcggcctggccgggacgcctcggggcgggggccgaggagctctccgggccgccggggaaagctacgggcccggtgcgtccgcggaccagcagcgcgggagagcggactcccctcgccaccgcccgagcccaggtaaccgcgccatgtcccctccccttcccccggccgggcccgcgcaccccgcctgtggcttccccgccccggggcgggctcccgacgacggcggcggcggcggcggcggctgggagcgcgcggaatcctctgggagggcgaccgcggcggcctgacgagccgggccgggcgggccggctgaatgccgggcggcggtgcctcgcgtccctcgggcccccagctccgcttgcagctcgtgggagaatcaagttaaactcggacgggactcctgccgcggccgccgctcctctttgttgttctcagtagtttcacggtcgccccggctgagcgcgttgggtcggctggaatgtgttgccttagggtctaagtgaaagttgtaaattgtttgtctaaatttattttctccagccaatttctgttttgtctttgtcccctactttctcttcctagtcttgtcatgccagtttacgcttctggctttgatatgtttactttttgag

SEQ ID NO: 663 - DNA, 1376 bp, Homo sapiens
ttcatttctaaattggggtttttttttttttttaattggtctcttttaacaaaggtgagtgttaactgctaggtagaatttcataccaggcgatggtaaatttttcataaatattagtaatagacttttaggtttaactagtgctgatcctcataagtaatcctttaaaaaagtgctggtaagattttcctttagggtgactagtaaagtcagtaagacttgattgagcatgccactatcataatgagaagacctaactttaatatttttggaatgtcaaaaacagtgacattttaattaagtaattttatttttaaaaattatttttaatggctaatattttgtaagaattttaagtaattttcaactctgagcatcaaattttaattatgtgcattgaatctctgacttaaccagagcaatttcatcttttcccaagtagtcagatctacttcgtaaaatgtgttctgatgtgtgtcttttttttttttcttttttaggttatcctgaatacatgtctaacaattttccttgcaacgttagctgttgtttttcactgtttccaaaggatcaaaattgcttcagaaattggagacatatttgatttaaaaggaaaaacttgaacaaatggacaatatgtctattacgaatacaccaacaagtaatgatgcctgtctgagcattgtgcatagtttgatgtgccatagacaaggtggagagagtgaaacatttgcaaaaagagcaattgaaagtttggtaaagaagctgaaggagaaaaaagatgaattggattctttaataacagctataactacaaatggagctcatcctagtaaatgtgttaccatacagagaacattggatgggaggcttcaggttagtcttataagagtttttctataccctctatggtggcagatttaaaaacttgctacgtttcctttcaagctactacagggtaatttaatttgtgctccatctcttcagatactgtgcatcctgtacaaatatgcattatgggaatttctggaagaatatgcaaaagataaaatcttaaagttttttaatgttctactcagaaaaatgttcaatggagaaaatttggaaaataaaaataaaaagcagaaaacccacacttcgcaagaactacctttagcactttggtattcatttttgtagcctgttgttttcttttttttttttttcctagacggagtcttgctctgtcacccaggctggagtacagtggcgtgatcttggcccactgcaacctccacctcttgggttcaagcaatcctcctgcctcagcctcctaagtagctgggactacaggcaagtgcaaccatgcctggctaatttttgtatttttagtagag

SEQ ID NO: 664 - DNA, 1175 bp, Homo sapiens
tcttacttttgcccaagctggagtgcagtggtgcaaaacatggctcactgcagccttgacctactgggcttatgcagttctcctgccttagcctcctgagtagctaggactacaggcacataccaccatgcctgggtaattttttattatttgtggagacaagggtcttgccatgttgtccaggctggtcttgaactcctgggctcaagcgatcctcctgccttggcctcccaaagtgataggattacaggtgtgagccaccatgcccagtcactttttacatttttaaaacctgagcacaggccttgaaattataccaaggtttaaattctaggtctgatgtatgacatggccaagttagttattgtgaattttagttttcttatttatgaaatggggattgtaatactgagttggtaggattgtgaggattaaatcagaatatataaaagtgtcttgcataatgtgacacatgaataaatggtcgtttatttttctaggtggctggtcggaaaggatttcctcatgtgatctatgcccgtctctggaggtggcctgatcttcacaaaaatgaactaaaacatgttaaatattgtcagtatgcgtttgacttaaaatgtgatagtgtctgtgtgaatccatatcactacgaacgagttgtatcacctggaattggtaagtagactttgctttcatcctaagaaacataaagggaaaaggatctcaatagtgtttcaatttttgtaagttaaattataaatttggaagatagcccgcgactttaaataaggttaaagaatcagacatttttaatatacgtatttaaatttgaatttaggaacaaacttatattttgactgctaaaaccgagtattgtagttgatattttgcccctttagaacattgtttttgagaaataagatggaaagcattataaatttgaatacttagttatgtattgttagatagcgtttatgctacttctgaattgaaatggttcatgaacttttgtaatctttggtttaaatttacattctctgtttttaaatggaaaatactttcattgtaatgattaatgtttcatttgttttcccctttaaacaattaagatctctcaggattaacactgcagagtaatggtaggtaatctgtttcttactactttctctttgttt

SEQ ID NO: 665 - DNA, 1030 bp, Homo sapiens
acttaaaatgtgatagtgtctgtgtgaatccatatcactacgaacgagttgtatcacctggaattggtaagtagactttgctttcatcctaagaaacataaagggaaaaggatctcaatagtgtttcaatttttgtaagttaaattataaatttggaagatagcccgcgactttaaataaggttaaagaatcagacatttttaatatacgtatttaaatttgaatttaggaacaaacttatattttgactgctaaaaccgagtattgtagttgatattttgcccctttagaacattgtttttgagaaataagatggaaagcattataaatttgaatacttagttatgtattgttagatagcgtttatgctacttctgaattgaaatggttcatgaacttttgtaatctttggtttaaatttacattctctgtttttaaatggaaaatactttcattgtaatgattaatgtttcatttgttttcccctttaaacaattaagatctctcaggattaacactgcagagtaatggtaggtaatctgtttcttactactttctctttgttttgtcctatcctctctgtttttttgttgacctagaattagtttgtgtgagcggcaggcagtaacattaacaagaaaataacttactgctttggaaatgtagattttgaggttaggggcatttaaaactggatttaaaactggatttaaattggctattgctctttgtatttgaactgcaatttatgaactaaagtactgtaaaaaaatatgatagaggaatgcaccaaaaacaaatataaagaatattttttgagttaagacctatttttgaagaaaatctcacagagccagtttaaatggatgttaaatacccagaatatttggtaatttggaatcacatataacatatcctttaaaaataccagtattctaattttccttcatttcagcctaacatttttatgaatgataatgttgagaatggtttaaaattgcactcttttgtattttttcagtcttgttac

SEQ ID NO: 666 - DNA, 1213 bp, Homo sapiens
cttaacaataattctagatcctgggattggatatctatcagatcccactcatatctccacagtgtgaaattaacaaaaagatatagttaaatactcagtctctatttagaccgaataattgtttttctcagctggacacattttccagccattcggtttttgcctgccttatgtatttaggtgattattcttctaggtttatcaagaaactgaggagtacctttttaggattgttgctggaggctgttgaaacatagactagcttcaaatttgagagtcagattgattgataaaatatatctcatgctgttaccgctgaataaatgacttttgctggtaaagtagtatgcttttaaaataatatgaaaaaattctgaattaaggttagtaatttacactgtaattgattttaggtgttattatattacttgctaataagatttttttttctgggaatagaagcttataaaaatttaaaatatgtttaattttctatatagctccatcaagtatgatggtgaaggatgaatatgtgcatgactttgagggacagccatcgttgtccactgaaggacattcaattcaaaccatccagcatccaccaagtaatcgtgcatcgacagagacatacagcaccccagctctgttagccccatctgagtctaatgctaccagcactgccaactttcccaacattcctgtggcttccacaagtgagttctagaatcagatgtagtcagcaagttgagttttcctaatcattgcttatttatgtgtagtcacttggggggaaactccaagtaagtaaacattaaaagtaactgtagtatctttcataggtaaacaggtattaaacaggtatgcacaatcacttggaatttaagtaatggctttgattataatattgatttaaattaatgatctgatttatactttactattacatgtagcagtaagtagcctcttaagctcccagatatattttggagaaatatttaaataattaacaagtagttttgatccaagatgtttatgaaggtctgtgttaatggaattgcaacctttcttttaatgcggtgttcttattttggtttttctgggacaatattaccttatagtagttgtctgattttctcactgtgcaaagggatcttgacaaatttgttatatattgctcaagatagacattaattaagtcaattttgatataagc

SEQ ID NO: 667 - DNA, 1120 bp, Homo sapiens
tatttaaaataattttctgctctgcttttctctgtcaaaccctagcattctgccattactagtatcagtgctgatagtgattaatttttcagttttcaacattttcttgagcctggatttttggggtcctaatcagaaaggtccagagagagaggtggatggagtggccaggatgaactgacatacctctgaagaagttaatatgataggccagacgtacagtggtgttttgctggcatttgaaatatgtttgtgaagaaataagccactacaattagttagacattacctaaaatggaataattttgagcttcctcaagttaaagtttgcctttatagatgactgtaggttttttacctgataggccatgggtgagttacactttttgcccatctttatagttgtgcattatcagataaaattggtccttcatttagtatatgaaatcataagatgacatctatgaatgtaccatgttaatgtcttcttgttcctctaggtcagcctgccagtatactggggggcagccatagtgaaggactgttgcagatagcatcagggcctcagccaggacagcagcagaatggatttactggtcagccagctacttaccatcatagtatgtacatactttaaaaaatcttttaaatagttgagaaaaaagtaggcagcctttataaaagcaaattaacccatgtgggccttaatttttagacagcactaccacctggactggaagtaggactgcaccatacacacctaatttgcctcaccaccaaaacggccatcttcagcaccacccgcctatgccgccccatcccggacattactgtaagctcttgtttttgttgtaagggctattttttttttttttttggtagggctttgttttctgttttttaaaaatgtttttacatcttttattcatcctgtgattttgtttcattaaatagtgcttttcagtattttttgtaaacagtattatttttcatagttatcctacctttttattttagaggagtgatgtttgctaaatacatttatttctctgttgctaatgtttcattaacatcacattgatttccattcatttgtttgtttgctttgtatatgttctta

SEQ ID NO: 668 - DNA, 1117 bp, Homo sapiens
cgtacagtggtgttttgctggcatttgaaatatgtttgtgaagaaataagccactacaattagttagacattacctaaaatggaataattttgagcttcctcaagttaaagtttgcctttatagatgactgtaggttttttacctgataggccatgggtgagttacactttttgcccatctttatagttgtgcattatcagataaaattggtccttcatttagtatatgaaatcataagatgacatctatgaatgtaccatgttaatgtcttcttgttcctctaggtcagcctgccagtatactggggggcagccatagtgaaggactgttgcagatagcatcagggcctcagccaggacagcagcagaatggatttactggtcagccagctacttaccatcatagtatgtacatactttaaaaaatcttttaaatagttgagaaaaaagtaggcagcctttataaaagcaaattaacccatgtgggccttaatttttagacagcactaccacctggactggaagtaggactgcaccatacacacctaatttgcctcaccaccaaaacggccatcttcagcaccacccgcctatgccgccccatcccggacattactgtaagctcttgtttttgttgtaagggctattttttttttttttttggtagggctttgttttctgttttttaaaaatgtttttacatcttttattcatcctgtgattttgtttcattaaatagtgcttttcagtattttttgtaaacagtattatttttcatagttatcctacctttttattttagaggagtgatgtttgctaaatacatttatttctctgttgctaatgtttcattaacatcacattgatttccattcatttgtttgtttgctttgtatatgttcttagatctcatctgtgtcttgtatatccacgcataatggattgaaaccctttgagtgctaagttctcaaggtttccctcagcgtagtattcagtgtactttggataatgttgaatctatagataactctgtgctggcatgattgggaggaataccctacagataacatgtagtttcaggtagaataggagcattgttcatatggcttagtaaaat

SEQ ID NO: 669 - DNA, 1051 bp, Homo sapiens
ctcaaggggtgttcgtaagaagtaaacgtaataatttatgtgaggtgtttagcacagtgttttaacacattaccagttttcaattatgttagctatgattccattaaataaacatccttaattaacataagcacttgtttttagaatagacctaacagtttattattatacattgcattataaattgtactgtattggacgttacatgaataattcatttatgatctgtattaaatgttggatataaaattatgtgtaaattgtgtaataatagcacttggcagatagcactgaaatgttagttattaaatatccacaaaagtattaatagtttaagactatttgcttattgtaaacttttaagttcttagacattgcataagcttgttttaaacaattcctaacctataatagttatatttaagtaagatttactgaaagttttagcattagacaacttttagtaaataaaaatggaatttttgttgtcttttctttagggcctgttcacaatgagcttgcattccagcctcccatttccaatcatcctggtaagtgtatttcaaaattgatttcctgtatttagattgatttagtggtgattgaaacgcacaaacacaggctttaatggaattatggggtcacttctcagatgagtacaatactcatcatgacatgagttaatcaacagtttgagtagtcaatatagtcacacatagactgtctatattttattcagtttaactgtccccaaaagaaaagaactatcttttcagctaaaatgagaattacagaaatgctgacttcagcattgaatacataaatatgcagcagaataaaactaggtttcaaaatagaacagctgtaaaactatagcttaaaaagccaggaaagaatcttaagtacatgccgaaaagaaaaataattcactctattcaggatctctggttaactggaatttagaaactatttgattaaattgtatgcaaaagagtaaatcgctaagtagctttcttcagttcaaagtttgtgtataatttttgaaactgta

SEQ ID NO: 670 - DNA, 1184 bp, Homo sapiens
aaaatatgtcatgagtcgatgttattcaaggacagttccctggaatacatcttagggtcagtgtgtttttaaaaaataaaagttgagactacatagagaatatgtgtagtcaaatgaaataccatggtaaaataatttattttagattctgattatttctgttctttaaattctcagttgacctggtcctttgaggtaagaaccaaattccagattttaaaaaatgacttttagaacttgaggataagtggtaattggaaattaaaaaaaaaaattagtgttttaagaacagtgctaagtactgagctagaaaatagaagacatggaaattcctaccttttaatgcattatgttattttaatccagttgttttgggtgcattacatttccatctcccctccctttaccctttcttttaggaaaaactgtgttgtggagtgcaagtgaaagccttatatctttctcatgggaggatgttctttcccatttatttcctatagctcctgagtattggtgttccattgcttactttgaaatggatgttcaggtaggagagacatttaaggttccttcaagctgccctattgttactgttgatggatacgtggacccttctggaggagatcgcttttgtttgggtcaactctccaatgtccacaggacagaagccattgagagagcaaggtattgattgtatagtcagatagttactttaaaaaattgagcatagtacattgtcttttattcaaggttatgttttcccatgtacattatatgtgttcttaaatataaataaaggaataaaggtcatgttgaaaactcagaatttgtaagcactccatcttaattgtcggtgtttttgttgtttaacatataatgataaaagatagccttttttatgttagtaggtttctatgtttcgaatagtaagtataccttttgaaattcagtttgaaaattttattttctgtgatcatacatttctacaaattactgaaaggaagtaatattaaatgagaacatgtttctgaaagttttacttataatgttaaaaaaattggtaataaaagggaaatggttaagtaaattatgataaatttttccttttttatacagtcattaaaatgtttaaaagtttatataatgaggctgggtgcggtggctcacacctataatcccagcac

SEQ ID NO: 671 - DNA, 1169 bp, Homo sapiens
tctaagccattctgcctaatagaattttctgtgatgaagaaaatgatttatatttgcactgtccagttcggtagccactagccacatgtaactattgagcacttaaattatagctcacttgattgactaatcggatttctaattagttttaatttaatttaaatagtcacatgtggctagtggctatcaatttggacagtatgccttagtttctttatctaaaaaaattagaataatagtacttgttgagttgtaagggtttaatgagaattcatactacatgctcctgacacatagtaagtgttgtaaatatgtgcatcattattagatatgaacaggaaaagaaaaaaggaaatatacaaaaatgttaatagctatcttttggttttatgtgatctttatttttaatttttcaatattaagcatgctatacaatctgaactaaaatttaatttaaaatacttatcaagataaaatgtaatttcttttttcttcctaaggttgcacataggcaaaggtgtgcagttggaatgtaaaggtgaaggtgatgtttgggtcaggtgccttagtgaccacgcggtctttgtacagagttactacttagacagagaagctgggcgtgcacctggagatgctgttcataagatctacccaagtgcatatataaaggttagttacaattttatttgaatattttagacttaaagctctatttgttgtcaaaagaattgaaatctgggtggaaggaatggaaaaatgttttatatattaaataataagaaattgtgtttaagtataaaaaacacattttctgagggcatttattgacattatcagtaatctagttttatcgttgccaatttgttacattttgttttttattttatttatttatttatttatttatttttgagacagagtcttgctctcgtcgcccaggctggaatgcagtggcgtgatctcggctcactgcaacctgcgcctcctgggttcaagcaattctcgtgcctcagcatcccaagtagctgggattacaggcacatgttactgtgcctggcaattttttgtatttttagtagagacggggtttcaccatgttggccaggctggtctcgaactcctgacctaaagtgatccgcccaacttggcctcccaaagtgctgggatta

SEQ ID NO: 672 - DNA, 1139 bp, Homo sapiens
tctatttgcttaaagtacgcatctctgaaaaatgttgatctctcttatatagcgacagtgccattttgttaaactcctccaaataagcaaaaatgataagacaaaaagttggccaggcgaccaaagctatcaactccagcctaaggaaaattcagcaatttgattatgaaagggggagggggacttcttaattgtacattttacacagatttccacaaggacagtaatagctgacccacttcgaactagataaaagatacagaggcgtgtggcagccaaagccatcatgatgttgacatgatcttcttggtgagctccaagccacctttcctaactagttttagaccaatcacaatgtacataaaagtttacatgttttaattaattcttttcatgtgagaggtataatgaaactgagttttaaataagtcaggcattggtttttaatgtatggaatttttctttatgaactcatagtatgaaatgttttttcttaaaaggtctttgatttgcgtcagtgtcatcgacagatgcagcagcaggcggctactgcacaagctgcagcagctgcccaggcagcagccgtggcaggaaacatccctggcccaggatcagtaggtggaatagctccagctatcagtaagtatgcttttcattcttttttaaaggtataatagttgatatttttatcttgatttactcagttgattagtttctttgagcagtaatagaaattaaagtttttttttactgggatgatgacatttttgaattggtaaaatctgttcttctgtaatagttgctttttgcctatgaccctgtttgcattctttttgtatcaaaaatggagtatgggatgaaggagaaaggggatgattattatattatactgttctatctcctccttttttgttgatgcttattataattctgcctcaccagccagggtgggttgtaatcactgaagtgcttggctttattctagtaaggaaagcatatttcaatttcagaattggacacttttccaattttttttttaaagtatgctaaacatggagagaaaactaagtgagggtggtattttgataacttgtagacttttttttaattttagggtaaaattgaactgtgtgccaggt

SEQ ID NO: 673 - DNA, 7786 bp, Homo sapiens
tgagtaatagtgtattactctgttacactttgaaattgagagagagacttcatctcggtcatctaagaggtcttagtggaactaagaatattaactgcttcattattagttatgtcttattctgaactaggctgtttagacagtaaggtttttagaagcaacctgtggacacgcactacctcttaaaaacaagttgtttcttatcccttcacctccacttctaaagaaaaaaataggtgaggtgttggtggattgtggtaatttactttataattggttgtagctagaagacacatgtgaaatgtaaagttccttaaccaaaagtgtgcagcttgttgataaagtttagatctactgttacttcttggcactttagcagagaagttatatgctgaggagaatgaaatacagaaagctggtcacttgattaatttagaatgtagggaggatgggaagagatcaccctgtccctctgatgtcttccaaatcttttctgttaggtctgtcagctgctgctggaattggtgttgatgaccttcgtcgcttatgcatactcaggatgagttttgtgaaaggctggggaccggattacccaagacagagcatcaaagaaacaccttgctggattgaaattcacttacaccgggccctccagctcctagacgaagtacttcataccatgccgattgcagacccacaacctttagactgaggtcttttaccgttggggcccttaaccttatcaggatggtggactacaaaatacaatcctgtttataatctgaagatatatttcacttttgttctgctttatcttttcataaagggttgaaaatgtgtttgctgccttgctcctagcagacagaaactggattaaaacaattttttttttcctcttcagaacttgtcaggcatggctcagagcttgaagattaggagaaacacattcttattaattcttcacctgttatgtatgaaggaatcattccagtgctagaaaatttagccctttaaaacgtcttagagccttttatctgcagaacatcgatatgtatatcattctacagaataatccagtattgctgattttaaaggcagagaagttctcaaagttaattcacctatgttattttgtgtacaagttgttattgttgaacatacttcaaaaataatgtgccatgtgggtgagttaattttaccaagagtaactttactctgtgtttaaaaagtaagttaataatgtattgtaatctttcatccaaaatattttttgcaagttatattagtgaagatggtttcaattcagattgtcttgcaacttcagttttatttttgccaaggcaaaaaactcttaatctgtgtgtatattgagaatcccttaaaattaccagacaaaaaaatttaaaattacgtttgttattcctagtggatgactgttgatgaagtatacttttcccctgttaaacagtagttgtattcttctgtatttctaggcacaaggttggttgctaagaagcctataagaggaatttcttttccttcattcatagggaaaggttttgtattttttaaaacactaaaagcagcgtcactctacctaatgtctcactgttctgcaaaggtggcaatgcttaaactaaataatgaataaactgaatattttggaaactgctaaattctatgttaaatactgtgcagaataatggaaacattacagttcataataggtagtttggatatttttgtacttgatttgatgtgactttttttggtataatgtttaaatcatgtatgttatgatattgtttaaaattcagtttttgtatcttggggcaagactgcaaacttttttatatcttttggttattctaagccctttgccatcaatgatcatatcaattggcagtgactttgtatagagaatttaagtagaaaagttgcagatgtattgactgtaccacagacacaatatgtatgctttttacctagctggtagcataaataaaactgaatctcaacatacaaagttgaattctaggtttgatttttaagattttttttttcttttgcacttttgagtccaatctcagtgatgaggtaccttctactaaatgacaggcaacagccagttctattgggcagctttgtttttttccctcacactctaccgggacttccccatggacattgtgtatcatgtgtagagttggttttttttttttttaatttttattttactatagcagaaatagacctgattatctacaagatgataaatagattgtctacaggataaatagtatgaaataaaatcaaggattatctttcagatgtgtttacttttgcctggagaacttttagctatagaaacacttgtgtgatgatagtcctccttatatcacctggaatgaacacagcttctactgccttgctcagaaggtcttttaaatagaccatcctagaaaccactgagtttgcttatttctgtgatttaaacatagatcttgatccaagctacatgacttttgtctttaaataacttatctaccacctcatttgtactcttgattacttacaaattctttcagtaaacacctaattttcttctgtaaaagtttggtgatttaagttttattggcagttttataaaaagacatcttctctagaaattgctaactttaggtccattttactgtgaatgaggaataggagtgagttttagaataacagatttttaaaaatccagatgatttgattaaaaccttaatcatacattgacataattcattgcttcttttttttgagatatggagtcttgctgtgttgcccaggcaggagtgcagtggtatgatctcagctcactgcaacctctgcctcccgggttcaactgattctcctgcctcagcctccctggtagctaggattacaggtgcccgccaccatgcctggctaacttttgtagttttagtagagacggggttttgcctgttggccaggctggtcttgaactcctgacctcaagtgatccatccaccttggcctcccaaagtgctgggattacgggcgtgagccactgtccctggcctcattgttcccttttctactttaaggaaagttttcatgtttaatcatctggggaaagtatgtgaaaaatatttgttaagaagtatctctttggagccaagccacctgtcttggtttctttctactaagagccataaagtatagaaatacttctagttgttaagtgcttatatttgtacctagatttagtcacacgcttttgagaaaacatctagtatgttatgatcagctattcctgagagcttggttgttaatctatatttctatttcttagtggtagtcatctttgatgaataagactaaagattctcacaggtttaaaattttatgtctactttaagggtaaaattatgaggttatggttctgggtgggttttctctagctaattcatatctcaaagagtctcaaaatgttgaatttcagtgcaagctgaatgagagatgagccatgtacacccaccgtaagacctcattccatgtttgtccagtgcctttcagtgcattatcaaagggaatccttcatggtgttgcctttattttccggggagtagatcgtgggatatagtctatctcatttttaatagtttaccgcccctggtatacaaagataatgacaataaatcactgccatataaccttgctttttccagaaacatggctgttttgtattgctgtaaccactaaataggttgcctataccattcctcctgtgaacagtgcagatttacaggttgcatggtctggcttaaggagagccatacttgagacatgtgagtaaactgaactcatattagctgtgctgcatttcagacttaaaatccatttttgtggggcagggtgtggtgtgtaaaggggggtgtttgtaatacaagttgaaggcaaaataaaatgtcctgtctcccagatgatatacatcttattatttttaaagtttattgctaattgtaggaaggtgagttgcaggtatctttgactatggtcatctggggaaggaaaattttacattttactattaatgctccttaagtgtctatggaggttaaagaataaaatggtaaatgtttctgtgcctggtttgatggtaactggttaatagttactcaccattttatgcagagtcacattagttcacaccctttctgagagccttttgggagaagcagttttattctctgagtggaacagagttctttttgttgataatttctagtttgctcccttcgttattgccaactttactggcattttatttaatgatagcagattgggaaaatggcaaatttaggttacggaggtaaatgagtatatgaaagcaattacctctaaagccagttaacaattattttgtaggtggggtacactcagcttaaagtaatgcatttttttttcccgtaaaggcagaatccatcttgttgcagatagctatctaaataatctcatatcctcttttgcaaagactacagagaataggctatgacaatcttgttcaagcctttccatttttttccctgataactaagtaatttctttgaacataccaagaagtatgtaaaaagtccatggccttattcatccacaaagtggcatcctaggcccagccttatccctagcagttgtcccagtgctgctaggttgcttatcttgtttatctggaatcactgtggagtgaaattttccacatcatccagaattgccttatttaagaagtaaaacgttttaatttttagcctttttttggtggagttatttaatatgtatatcagaggatatactagatggtaacatttctttctgtgcttggctatctttgtggacttcaggggcttctaaaacagacaggactgtgttgcctttactaaatggtctgagacagctatggttttgaatttttagttttttttttttaacccacttcccctcctggtctcttccctctctgataattaccattcatatgtgagtgttagtgtgcctccttttagcattttcttcttctctttctgattcttcatttctgactgcctaggcaaggaaaccagataaccaaacttactagaacgttctttaaaacacaagtacaaactctgggacaggacccaagacactttcctgtgaagtgctgaaaaagacctcattgtattggcatttgatatcagtttgatgtagcttagagtgcttcctgattcttgctgagtttcaggtagttgagatagagagaagtgagtcatattcatattttcccccttagaataatattttgaaaggtttcattgcttccacttgaatgctgctcttacaaaaactggggttacaagggttactaaattagcatcagtagccagaggcaataccgttgtctggaggacaccagcaaacaacacacaacaaagcaaaacaaaccttgggaaactaaggccatttgttttgttttggtgtcccctttgaagccctgccttctggccttactcctgtacagatatttttgacctataggtgcctttatgagaattgagggtctgacatcctgccccaaggagtagctaaagtaattgctagtgttttcagggattttaacatcagactggaatgaatgaatgaaactttttgtcctttttttttctgtttttttttttctaatgtagtaaggactaaggaaaacctttggtgaagacaatcatttctctctgttgatgtggatacttttcacaccgtttatttaaatgctttctcaataggtccagagccagtgttcttgttcaacctgaaagtaatggctctgggttgggccagacagttgcactctctagtttgccctctgccacaaatttgatgtgtgacctttgggcaagtcatttatcttctctgggccttagttgcctcatctgtaaaatgagggagttggagtagattaattattccagctctgaaattctaagtgaccttggctaccttgcagcagttttggatttcttccttatctttgttctgctgtttgagggggctttttacttatttccatgttattcaaaggagactaggcttgatattttattactgttcttttatggacaaaaggttacatagtatgcccttaagacttaattttaaccaaaggcctagcaccaccttaggggctgcaataaacacttaacgcgcgtgcgcacgcgcgcgcgcacacacacacacacacacacacacacacacaggtcagagtttaaggctttcgagtcatgacattctagcttttgaattgcgtgcacacacacacgcacgcacacactctggtcagagtttattaaggctttcgagtcatgacattatagcttttgagttggtgtgtgtgacaccaccctcctaagtggtgtgtgcttgtaattttttttttcagtgaaaatggattgaaaacctgttgttaatgcttagtgatattatgctcaaaacaaggaaattcccttgaaccgtgtcaattaaactggtttatatgactcaagaaaacaataccagtagatgattattaactttattcttggctctttttaggtccattttgattaagtgacttttggctggatcattcagagctctcttctagcctacccttggatgagtacaattaatgaaattcatattttcaaggacctgggagccttccttggggctgggttgagggtggggggttggggagtcctggtagaggccagctttgtggtagctggagaggaagggatgaaaccagctgctgttgcaaaggctgcttgtcattgatagaaggactcacgggcttggattgattaagactaaacatggagttggcaaactttcttcaagtattgagttctgttcaatgcattggacatgtgatttaagggaaaagtgtgaatgcttatagatgatgaaaacctggtgggctgcagagcccagtttagaagaagtgagttgggggttggggacagatttggtggtggtatttcccaactgtttcctcccctaaattcagaggaatgcagctatgccagaagccagagaagagccactcgtagcttctgctttggggacaactggtcagttgaaagtcccaggagttcctttgtggctttctgtatacttttgcctggttaaagtctgtggctaaaaaatagtcgaacctttcttgagaactctgtaacaaagtatgtttttgattaaaagagaaagccaactaaatcattatgtgctcattctttttcttaagcttgtggatgtcttggatctggaaagggtttctgatcacttagagaattttcaaactttaggtcaacattttcctttattgccttgtggccactgaaatgggaaatgtgacatttaaaatatgaccctggaataacagtccccattcttctctcatttttaaaaggagaaggtgaagtgatggtgatcagagagatgggtgctagggaattataagaaccaggatgcttaaaggagaggtaaaattggaaattggagaccctttcattgcccagctaagggataaggaaagctgtttctctcccatctgccttctctgtgaaataggggtcaatgggaggggagtggtggtcaggtaagtagattccgtggcaatggcttgtatataacaagaccacatcagcattttatttctaagcttgctgacatgagtttcagagagtttatcgggctgagagatttcttctcacct

SEQ ID NO: 674 - DNA, 1500 bp, Homo sapiens
tttgtggtagctggagaggaagggatgaaaccagctgctgttgcaaaggctgcttgtcattgatagaaggactcacgggcttggattgattaagactaaacatggagttggcaaactttcttcaagtattgagttctgttcaatgcattggacatgtgatttaagggaaaagtgtgaatgcttatagatgatgaaaacctggtgggctgcagagcccagtttagaagaagtgagttgggggttggggacagatttggtggtggtatttcccaactgtttcctcccctaaattcagaggaatgcagctatgccagaagccagagaagagccactcgtagcttctgctttggggacaactggtcagttgaaagtcccaggagttcctttgtggctttctgtatacttttgcctggttaaagtctgtggctaaaaaatagtcgaacctttcttgagaactctgtaacaaagtatgtttttgattaaaagagaaagccaactaaatcattatgtgctcattctttttcttaagcttgtggatgtcttggatctggaaagggtttctgatcacttagagaattttcaaactttaggtcaacattttcctttattgccttgtggccactgaaatgggaaatgtgacatttaaaatatgaccctggaataacagtccccattcttctctcatttttaaaaggagaaggtgaagtgatggtgatcagagagatgggtgctagggaattataagaaccaggatgcttaaaggagaggtaaaattggaaattggagaccctttcattgcccagctaagggataaggaaagctgtttctctcccatctgccttctctgtgaaataggggtcaatgggaggggagtggtggtcaggtaagtagattccgtggcaatggcttgtatataacaagaccacatcagcattttatttctaagcttgctgacatgagtttcagagagtttatcgggctgagagatttcttctcacctgtttgctaacctgaaatttatagtattttaggctagaacttgaagaggatagtaggttagcattcagttgagaaaaaggaaaaacattgtggagcacttcaggtgaaagggcagttgtgtgtctctctgccttctgctcttgacccttaattctttgtgcttaattccatctcctcccacgtcacaactctctcacaaatggcagtctcaaagcttagggaatctccatcacttcttcaaacctttcccacccctgttgtcttactgataaattgtaatgccctttctcctcagccctttgtattctaaaagaataattccattagttctggcctacttttggagtggcatccacatctatattttgatagttttgttaggccaccactaggtctcagacagatggacaagaggcgttcagggagagcagacaatccattgccagcagacctaccttaatcgagtggtagtaaaggaagttccctaagcagaaaagaaag

SEQ ID NO: 675 - DNA, 3277 bp, Homo sapiens
gcgtgtcgggcgcggaagggggaggcggcccggggcgcccgcgagtgaggcgcggggcggcgaagggagcgcgggtggcggcacttgctgccgcggccttggatgggctgggcccccctcgccgctccgcctcctccacacgcgcggcggccgcggcgagggggacgcgccgcccggggcccggcaccttcgggaaccccccggcccggagcctgcggcctgcgccgcctcggccgccgggagccccgtggagcccccgccgccgcgccgccccgcggaccggacgctgagggcactcggggcggggcgcgcgctcgggcagacgtttgcggggaggggggcgcctgccgggccccggcgaccaccttgggggtcgcgggccggctcggggggcgcccagtgcgggccctcgcgggcgccgggcagcgaccagccctgagcggagctgttggccgcggcgggaggcctcccggacgcccccagccccccgaacgctcgcccgggccggcgggagtcggcgccccccgggaggtccgctcggtcgtccgcggcggagcgtttgctcctgggacaggcggtgggaccggggcgtcgccggagacgcccccagcgaagttgggctctccaggtgtgggggtcccggggggtagcgacgtcgcggacccggcctgtgggatgggcggcccggagaagactgcgctcggccgtgttcatacttgtccgtgggcctgaggtccccggaggatgacctagcactgaaaagccccggccggcctccccagggtccccgaggacgaagttgaccctgaccgggccgtctcccagttctgaggcccgggtcccactggaactcgcgtctgagccgccgtcccggacccccggtgcccgccggtccgcagaccctgcaccgggcttggactcgcagccgggactgacgtgtagaacaatcgtttctgttggaagaagggtttttcccttccttttggggtttttgttgccttttttttttcttttttctttgtaaaattttggagaagggaagtcggaacacaaggaaggaccgctcacccgcggactcagggctggcggcgggactccaggaccctgggtccagcatggaggtggtggacccgcagcagctgggcatgttcacggagggcgagctgatgtcggtgggtatggacacgttcatccaccgcatcgactccaccgaggtcatctaccagccgcgccgcaagcgggccaagctcatcggcaagtacctgatgggggacctgctgggggaaggctcttacggcaaggtgaaggaggtgctggactcggagacgctgtgcaggagggccgtcaagatcctcaagaagaagaagttgcgaaggatccccaacggggaggccaacgtgaagaaggaaattcaactactgaggaggttacggcacaaaaatgtcatccagctggtggatgtgttatacaacgaagagaagcagaaaatgtatatggtgatggagtactgcgtgtgtggcatgcaggaaatgctggacagcgtgccggagaagcgtttcccagtgtgccaggcccacgggtacttctgtcagctgattgacggcctggagtacctgcatagccagggcattgtgcacaaggacatcaagccggggaacctgctgctcaccaccggtggcaccctcaaaatctccgacctgggcgtggccgaggcactgcacccgttcgcggcggacgacacctgccggaccagccagggctccccggctttccagccgcccgagattgccaacggcctggacaccttctccggcttcaaggtggacatctggtcggctggggtcaccctctacaacatcaccacgggtctgtaccccttcgaaggggacaacatctacaagttgtttgagaacatcgggaaggggagctacgccatcccgggcgactgtggccccccgctctctgacctgctgaaagggatgcttgagtacgaaccggccaagaggttctccatccggcagatccggcagcacagctggttccggaagaaacatcctccggctgaagcaccagtgcccatcccaccgagcccagacaccaaggaccggtggcgcagcatgactgtggtgccgtacttggaggacctgcacggcgcggacgaggacgaggacctcttcgacatcgaggatgacatcatctacactcaggacttcacggtgcccggacaggtcccagaagaggaggccagtcacaatggacagcgccggggcctccccaaggccgtgtgtatgaacggcacagaggcggcgcagctgagcaccaaatccagggcggagggccgggcccccaaccctgcccgcaaggcctgctccgccagcagcaagatccgccggctgtcggcctgcaagcagcagtgaggctggccgcctgcagcccgtgtccaggagccccgccaggtgcccgcgccaggccctcagtcttcctgccggttccgcccgccctcccggagaggtggccgccatgcttctgtgccgaccacgccccaggacctccggagcgccctgcagggccgggcagggggacagcagggaccgggcgcagccctcccccctcggccgcccggcagtgcacgcggcttgttgacttcgcagccccgggcggagccttcccgggcgggcgtgggaggagggaggcggcctccatgcactttatgtggagactactggccccgcccgtggcctcgtgctccgcagggcgcccagcgccgtccggcggccccgccgcagaccagctggcgggtgtggagaccaggctcctgaccccgccatgcatgcagcgccacctggaagccgcgcggccgctttggttttttgtttggttggttccattttctttttttctttttttttttaagaaaaaataaaaggtggatttgagctgtggctgtgaggggtgtttgggagctgctgggtggcaggggggctgtggggtcgggctcacgtcgcggccgcctttgcgctctcgggtcaccctgctttggcggcccggccggagggcaggaccctcacctctcccccaaggccactgcgctcttgggaccccagagaaaacccggagcaagcaggagtgtgcggtcaatatttatatcatccagaaaagaaaaacacgagaaacgccatcgcgggatggtgcagacgcggcggggactcggagggtgccgtgcgggcgaggccgcccaaatttggcaataaataaagcttgggaagcttggacctga

SEQ ID NO: 676 - DNA, 1500 bp, Homo sapiens
agctggagtgcagtggcacgatctcggctcaccgcaacctcctcctcccgggttcaagcgattctcctccctcagccttctgagtagctgggattacagacatgcacctgtaatttctactaaaaatacaaaaattagccgggcgtggtggcgcacgcctgtaatctcagctactggggaggctgaggcaggagaatcgcttgaaaccaggaggcggagattgtaccaagatagtttgttccagctaaacaacctggcgctagtgcaggaaaaggtggaaggcacggggctagcacaggagggttcaatattttcaaccttatcaagccatattttggcaactcttgtttttcacgagaagcccccgctgggcttgtcccagcgctgtcctgaggcttcccccatgagttccgatagggcagaggccgccctgagcgtttctctttcccctggtccaagagtggctcaaaagaaggatttttgactggaattggccactttgtgttactttttgacccttgacctcgccccaaagggggatgcgggggaggggctctggtaggggtggccccgctccttccaggtccgcaagcccaggttcccgcccaccgggctcagcccaccctgcggccgttcagggaggccgttggcacccgtgacctacgacccccttcccgagccccaccgaggtcacagccgtggcctcgtctccccatgcctgcttcccgccccctgcccgtgacgggcgtctccgaggaccaatgagcgcgctgtatccacccctcgggcggggccaagcgccgaccaatcgccgctcgggcgcccggccgggtccaaacgctccaatcgtcagcggcggcggggcgggcagagggccggggatggcaggttcaaccaacgggtgggcacgtcgtcctcgcgaggaggcgtgccctgcggccgggcgtgcggtgtccgcggcggcgcagggagggggagggaggtaaacaagatggcggcggcgtgtcgggcgcggaagggggaggcggcccggggcgcccgcgagtgaggcgcggggcggcgaagggagcgcgggtggcggcacttgctgccgcggccttggatgggctgggcccccctcgccgctccgcctcctccacacgcgcggcggccgcggcgagggggacgcgccgcccggggcccggcaccttcgggaaccccccggcccggagcctgcggcctgcgccgcctcggccgccgggagccccgtggagcccccgccgccgcgccgccccgcggaccggacgctgagggcactcggggcggggcgcgcgctcgggcagacgtttgcggggaggggggcgcctgccgggccccggcgaccaccttgggggtcgcgggccggctcggggggcgcccagtgcgggccctcgcgggcgccgggcagcgaccagccctgagcggagctgttggccgcggcgggaggcctcccggacgcccccagccccccgaacgctcgcc

SEQ ID NO: 677 - DNA, 2405 bp, Homo sapiens
tgtgttactttttgacccttgacctcgccccaaagggggatgcgggggaggggctctggtaggggtggccccgctccttccaggtccgcaagcccaggttcccgcccaccgggctcagcccaccctgcggccgttcagggaggccgttggcacccgtgacctacgacccccttcccgagccccaccgaggtcacagccgtggcctcgtctccccatgcctgcttcccgccccctgcccgtgacgggcgtctccgaggaccaatgagcgcgctgtatccacccctcgggcggggccaagcgccgaccaatcgccgctcgggcgcccggccgggtccaaacgctccaatcgtcagcggcggcggggcgggcagagggccggggatggcaggttcaaccaacgggtgggcacgtcgtcctcgcgaggaggcgtgccctgcggccgggcgtgcggtgtccgcggcggcgcagggagggggagggaggtaaacaagatggcggcggcgtgtcgggcgcggaagggggaggcggcccggggcgcccgcgagtgaggcgcggggcggcgaagggagcgcgggtggcggcacttgctgccgcggccttggatgggctgggcccccctcgccgctccgcctcctccacacgcgcggcggccgcggcgagggggacgcgccgcccggggcccggcaccttcgggaaccccccggcccggagcctgcggcctgcgccgcctcggccgccgggagccccgtggagcccccgccgccgcgccgccccgcggaccggacgctgagggcactcggggcggggcgcgcgctcgggcagacgtttgcggggaggggggcgcctgccgggccccggcgaccaccttgggggtcgcgggccggctcggggggcgcccagtgcgggccctcgcgggcgccgggcagcgaccagccctgagcggagctgttggccgcggcgggaggcctcccggacgcccccagccccccgaacgctcgcccgggccggcgggagtcggcgccccccgggaggtccgctcggtcgtccgcggcggagcgtttgctcctgggacaggcggtgggaccggggcgtcgccggagacgcccccagcgaagttgggctctccaggtgtgggggtcccggggggtagcgacgtcgcggacccggcctgtgggatgggcggcccggagaagactgcgctcggccgtgttcatacttgtccgtgggcctgaggtccccggaggatgacctagcactgaaaagccccggccggcctccccagggtccccgaggacgaagttgaccctgaccgggccgtctcccagttctgaggcccgggtcccactggaactcgcgtctgagccgccgtcccggacccccggtgcccgccggtccgcagaccctgcaccgggcttggactcgcagccgggactgacgtgtagaacaatcgtttctgttggaagaagggtttttcccttccttttggggtttttgttgccttttttttttcttttttctttgtaaaattttggagaagggaagtcggaacacaaggaaggaccgctcacccgcggactcagggctggcggcgggactccaggaccctgggtccagcatggaggtggtggacccgcagcagctgggcatgttcacggagggcgagctgatgtcggtgggtatggacacgttcatccaccgcatcgactccaccgaggtcatctaccagccgcgccgcaagcgggccaagctcatcggcaagtacctgatgggggacctgctgggggaaggctcttacggcaaggtgaaggaggtgctggactcggagacgctgtgcaggagggccgtcaagatcctcaagaagaagaagttgcgaaggatccccaacggggaggccaacgtgaagaagtaagtatggcttgctggggtcggggccgggccgggccagtcacggtgctgatggttctgtcttccttccttctctcctccctccctcccttacttcctcttaacaccctgagctggacccgtctggcgcctgtgtcctccgtgccagggagagcgtggttgggggcctgcgttacggactttcactcaggcaaggccagttgtcgcagcggggcgtgcgtttgcatgggctcttggactccagttaaaatgccctggtagcgaaaccctcctgagaagggagcggcccccaatcccctaagactagccccttggctcccccagctgtccaaggagcagaggcgcccagtggaatcagcctgtgtttgtttgggccccgagagtttgtgtgcggccgccaacacgttttctgcgcagtgtgtggccgttaccggggccaggcgaaatgtgatttgtttatcctgtcagaggggaaccctgggctgccaaaaataactgtt

SEQ ID NO: 678 - DNA, 1084 bp, Homo sapiens
ggcggatcacaaggtcaggagatcgagaccatcctggccaacatggtgaaaccctgtctgtactaaaatacaaaaaaattagccggctgtggtgacacgtgcctgtagtcccagctactcgggaggctgaggcagggaaatcacttgaacctgggaggcagaggttgcagtgagctgagatcgggccaccgtgctccagcctagggacagagcaagactctgtctcagaaaaaaaaaaaagtgtcctaactgtgtcctccaaagccctcgccggccgatgacagactagagggcgctgtgctcccaccccctaccgccctgagcctggacgcgtggcccctgcagggccctttcccacagcactgtgaactcacagcttctctctagggaagggaggaggtacgccacttccacagggagatggggaggccgactccagggatccaggccatcatcctgacgttgggtcggctgatacacccctgtcctctctgtcccagggaaattcaactactgaggaggttacggcacaaaaatgtcatccagctggtggatgtgttatacaacgaagagaagcagaaaatatatcctttccggtgttgggaccgcggggcctccgtgggaggggctggggccctgggtccgcctgcctcgaggcctgctcctcttcccgtctccttgaaggagactggcacacgagggccgtggccttccctggttccccggaagtcagccattgtggcaatggctgcgcagcttgctgaaaggggccctgagccctggcccctgtgtcttgggcccgtggggtgtcaagtcccttttttctcagagtctcctcccaggctaaccaggggtgtagccacggtctgcctgagacaggccacgcgggctgaccgttgtgggccattttggtcgtggctgggcgtgtcctcgtgtcatctgtggacacccccatgggtcttacgggcacagcctccctacggggactttgcttcctaaggccctgtgcccagagcaagagccagaagtggtcctgaggctggggctgtgttccctgagccacgcggtcaggggccctgggacc

SEQ ID NO: 679 - DNA, 1090 bp, Homo sapiens
tttggtcgtggctgggcgtgtcctcgtgtcatctgtggacacccccatgggtcttacgggcacagcctccctacggggactttgcttcctaaggccctgtgcccagagcaagagccagaagtggtcctgaggctggggctgtgttccctgagccacgcggtcaggggccctgggaccgtcctgcatgggcccgagcctgcttgggggggcgtccaggaggcaccatcccccgcccatgggcagggtgggggacgtgagccccgcaggaacgctgccccaagagtcagccctgtcctccccttccccgtaggctccttcctcctgggacgctggggcccctgggccttttcagaggggtggctgagggcagggtgggccctggtcccgaggaggggcaaggtgggtgcagagggtccctccagagccccttttctggcccccgtgctccctgggcctgtgagtggggccgccccctgagctgtgtgtccttagcgccccacgtatatggtgatggagtactgcgtgtgtggcatgcaggaaatgctggacagcgtgccggagaagcgtttcccagtgtgccaggcccacgggtgcgtgcgcggggcaggggccagggtggggcgggggccgggggccaggcagggcaggctcctttccgtgaggccacactgcttgtcctgatattcattgacatgaaggcccaagtttttttgtttttttgtttttttgtgttttttttcgagatggagtctcactctgtcgcccaggctggagtgcaatggtgcgatctcggctcactgcaagctccgcctccgaggttcacgccattcttctgcctcagcttcccgagtagctgggattacaggcgcccgccaccacgcccggctaattttttgtatttttagtagagacggggtttcaccgtgttagccaggatggtctcaaactcctgacctcgtgatccgcctgcctcagcctcccaaagtgctgggattacaggcatgagctaccacgcccggccttgtaaaggcccaagtttttaaaaacagttttggggtcccccatgtgtggcatccacaggcagggctgc

SEQ ID NO: 680 - DNA, 1133 bp, Homo sapiens
ttttggggtcccccatgtgtggcatccacaggcagggctgctgccaacctcccgcctccatctttgctgggcctgctgcctgaggccagtggcctgcttccagcccatcgctggcagccgcctgccctgaccagatctcctggatgcaggtctgtggcctcagagtcagggccccttgctgctgcaggaccacaggggcagggaggggcctgctgttccagcaagactttggggtgcagccggcctgtggcccacaggaaaatgagacctgtggacatccggggccctgccagacgtggctcggccggacgagggtggccactgcaggcgcaggtgtggctccctgctggacctagcctttcctctgtcctgtgtgcctggacttctgtgacttcccagctgggcctgtggtgtttgggaggctcccaggcagctgcaaaggggacccctgtgaggggcagggaggcctcggccccaggacgggtgtgtgctgcccgcaggtacttctgtcagctgattgacggcctggagtacctgcatagccagggcattgtgcacaaggacatcaagccggggaacctgctgctcaccaccggtggcaccctcaaaatctccgacctgggcgtggccgaggtaggcacgtgctagggggggccctggggcgccccctcccgggcactccctgagggctgcacggcaccgccacaggcactgcacccgttcgcggcggacgacacctgccggaccagccagggctccccggctttccagccgcccgagattgccaacggcctggacaccttctccggcttcaaggtggacatctggtcggctggggtcaccctgtaagtgccccgcccccccgggcactcaccacacgcacactccgaggggcctctgcgtcttgggcagctgccggcctgtgggcgcagggcgtggccaccggcccagaccctctctggccacagccgctagggggtgcttactttatggaaatgtaactcatacggcagatggtggttcacccgtgtgaagtgcagcctggcccgtcagggatcttcacagagtggcacggccgaccctcctcccagagccccacagggaagctgggcgggtgacagcagctccaggcc

SEQ ID NO: 681 - DNA, 1137 bp, Homo sapiens
cctgctgttccagcaagactttggggtgcagccggcctgtggcccacaggaaaatgagacctgtggacatccggggccctgccagacgtggctcggccggacgagggtggccactgcaggcgcaggtgtggctccctgctggacctagcctttcctctgtcctgtgtgcctggacttctgtgacttcccagctgggcctgtggtgtttgggaggctcccaggcagctgcaaaggggacccctgtgaggggcagggaggcctcggccccaggacgggtgtgtgctgcccgcaggtacttctgtcagctgattgacggcctggagtacctgcatagccagggcattgtgcacaaggacatcaagccggggaacctgctgctcaccaccggtggcaccctcaaaatctccgacctgggcgtggccgaggtaggcacgtgctagggggggccctggggcgccccctcccgggcactccctgagggctgcacggcaccgccacaggcactgcacccgttcgcggcggacgacacctgccggaccagccagggctccccggctttccagccgcccgagattgccaacggcctggacaccttctccggcttcaaggtggacatctggtcggctggggtcaccctgtaagtgccccgcccccccgggcactcaccacacgcacactccgaggggcctctgcgtcttgggcagctgccggcctgtgggcgcagggcgtggccaccggcccagaccctctctggccacagccgctagggggtgcttactttatggaaatgtaactcatacggcagatggtggttcacccgtgtgaagtgcagcctggcccgtcagggatcttcacagagtggcacggccgaccctcctcccagagccccacagggaagctgggcgggtgacagcagctccaggccccttccccgggtgggtccagaggacactcccctcctaccccgtagcctccactagtggaaggtggtgaagacagaggtgtccttgagtccacagggcctctggtccagcagccacgggacgcctctgtccctggggtagagctggggctcctagggcgtcaaccaccttgactgaccacgcctttcttccctcccctcgaaatgaagctaca

SEQ ID NO: 682 - DNA, 1128 bp, Homo sapiens
accctgtaagtgccccgcccccccgggcactcaccacacgcacactccgaggggcctctgcgtcttgggcagctgccggcctgtgggcgcagggcgtggccaccggcccagaccctctctggccacagccgctagggggtgcttactttatggaaatgtaactcatacggcagatggtggttcacccgtgtgaagtgcagcctggcccgtcagggatcttcacagagtggcacggccgaccctcctcccagagccccacagggaagctgggcgggtgacagcagctccaggccccttccccgggtgggtccagaggacactcccctcctaccccgtagcctccactagtggaaggtggtgaagacagaggtgtccttgagtccacagggcctctggtccagcagccacgggacgcctctgtccctggggtagagctggggctcctagggcgtcaaccaccttgactgaccacgcctttcttccctcccctcgaaatgaagctacaacatcaccacgggtctgtaccccttcgaaggggacaacatctacaagttgtttgagaacatcgggaaggggagctacgccatcccgggcgactgtggccccccgctctctgacctgctgaaaggtgggagcctcatccctctgcccgcagccccagggaggcggggcttttgtgcagaaatgtagggttgggggtgtcaggtggggggctattggccccgagaccccagcaggcattgagaggactgagtggagaggccgacctccccgcagggcctggtttgccaggtccctcagctccaccctgcttctgggccctgttcaccctccgaactcccaccccagagggcagtgctgccctgcgcctcccccagccccaccctcgggggctccctggcttgcagggtctgtcagggttgtcctgctgcacttcctacgcatggcagcaggtggcactggccgtccgtccatctgcccagtggccttgggagaacggaaccgccctggccgtccagcccagccctgtctccctgccagccgcgcacaggctgtccccggcatgtcccaggagtggagtggcctctgtcagggagaccgcctgtgcgcggggtcccccttaggagc

SEQ ID NO: 683 - DNA, 1058 bp, Homo sapiens
ggcattgagaggactgagtggagaggccgacctccccgcagggcctggtttgccaggtccctcagctccaccctgcttctgggccctgttcaccctccgaactcccaccccagagggcagtgctgccctgcgcctcccccagccccaccctcgggggctccctggcttgcagggtctgtcagggttgtcctgctgcacttcctacgcatggcagcaggtggcactggccgtccgtccatctgcccagtggccttgggagaacggaaccgccctggccgtccagcccagccctgtctccctgccagccgcgcacaggctgtccccggcatgtcccaggagtggagtggcctctgtcagggagaccgcctgtgcgcggggtcccccttaggagcgtccaggtatcacccagggcctgacaacagaggctgggcaggcggggacggttggtggggtctcaggcctgtgcccagctgacaggctcctcgccggcttctcctcagggatgcttgagtacgaaccggccaagaggttctccatccggcagatccggcagcacaggtgagcggcccctgggggcagtggggccgaggctgcagggaggccggccatgtgggcagctggttgagcgggcgctagagcagggcgtggtgggggtgccaggctgggctggggccagaccccgtgcagcgcccgcagttctcggggcccgagtggggtctctgggcagtgtcctgttaccggccagacccaggcgccttgtccgaactggggtctgagtgaggacatgcgtccgtccctgccctaggcatggagatgcgccaggaagggcacagctggtcccaaacactggcgagagcctctctttttcccctcctcctggggctcccagcagcagggtgtggctgggatccagcccagggcccccagctccatgacagggaagacagagcagcggacggggtcagcaggccccacagtgccgcctccctcacttcgtgggctctgctcctctgcaccagcccctggaggcccttgagccgtctgctggagcccctccg

SEQ ID NO: 684 - DNA, 1188 bp, Homo sapiens
gccgtctgctggagcccctccgagccccgaggccacccactgagaccggctctgggagtgggagtgtccggacccctgaggcgctggtgctgattgtgccttgggggtctctgcacagctcgggtcatctgggcgcctggcggggactggggctgccccccgatagcctcctgggctgggatgtgctcagggccccccagacccccttctggcctttgctggctttgcagccagcatccatctggtgggtgctggcttctgagtgccacctgggacacaggcctcagggtggaggggacatctgtcaggcttggagtcaggtcagcctgcctgctcctagaggacatggctgagcttctgtggtcacagccaccccttgcacggcctggtcccagctcctgagtgtgtggcaggtaccctgggcccagaggagctgggtcggaaaactggaccgccctggtgccagcctgacaggcgccactgcttctgggcgtttgcagctggttccggaagaaacatcctccggctgaagcaccagtgcccatcccaccgagcccagacaccaaggaccggtggcgcagcatgactgtggtgccgtacttggaggacctgcacggcgcggacgaggacgaggacctcttcgacatcgaggatgacatcatctacactcaggacttcacggtgcccggtgagtctggcgggggcccctgcccggctctgctgactcggccaggatgtcccacgggagcagggtgcctgcctgtctgcaacaaggacagcttctgccctctggtggccaatcccacgtccccaaagcctccagcccacctgcaggctgcctccgccctgcgggccgctgggacatggctgaaaggtgtggggtcagcgggggcaccagcccaggcctgtctggccaggagggttcctcaggcgtctctccgggtgctgcccagccaggcaccacccaccggccttggcctgagtcccagcaggagcaggcgggggagccccagggtcgggggagggtaggtgagagtcagggtgcagggtggcccctcagacagctggcatgagagagggtccagtggccctccctcccgtcgtccctgaggcctgcccgctggccctgatgccggccgcccttcttccctaggtggcgaggaggcgtctgaggcagggcttagagcg

SEQ ID NO: 685 - DNA, 1210 bp, Homo sapiens
gccctggcaggctgagctctgctccccgcgtggttctgtgctggcatttcgcgtgcctggcctgagcctggcccgagcctggccctcctgtgtcctcacagatgagcatgtggcggctcctgggcctctagaaccaaccatgggccagggtgccccaggggagcacgggagggtcctgccttgtcagcttgcctcctactcgtgaggttcctgcagtcagtacctgggtggggtcccacctgcggccatggcaggtgcaacagacgtggtggaggggacactcctgcccaggccatctgcgggaggctcagccccggggggtgcctcccagagctgctggggggcagcatttcaggctggatacacctgggcctgacccgggggcgggcatggcctgggcagcagctgtaagtgcgtccccgtggtgggggccagccaggtccctgtggctctggggttgcgcccctcagctcaggccacacttgccgtctccctcccaggacaggtcccagaagaggaggccagtcacaatggacagcgccggggcctccccaaggccgtgtgtatgaacggcacagaggcggcgcagctgagcaccaaatccagggcggagggccgggcccccaaccctgcccgcaaggcctgctccgccagcagcaagatccgccggctgtcggcctgcaagcagcagtgaggctggccgcctgcaggtggggcgcggcggggcccgggtggggcatgtggggacaacgcctggatgccacagccagccgtgagcatagcccgcgctagtcagtcatggtgaccgtcacgtggctgcgcgtggttgccatgtggcctttgggtggcttggccacgtagcgatccccgtggagggtgccgtctcggggcctggtgtctggccagcgtgctggtcatggaggcctacgtgtggcggggctctgggggggcgtgccgtcctcacagccacctctcagagtgggtgcattccgaggaccctgccctgggcctggcgccccctccccatgcccgcgccgcttccaggaaaggcttatgctgggctcagcccagaggcttttgagcaccagtgggtggtgggtggtggggaggggccgcggcctccatggctctgccggggtgccgcaggctctgagccagctgccaagtatggctgaggctgagtcgtgccggacgctgccctgtctctccc

SEQ ID NO: 686 - DNA, 1843 bp, Homo sapiens
gccgcaggctctgagccagctgccaagtatggctgaggctgagtcgtgccggacgctgccctgtctctccctgtgtgcctgcctcctctcccagccccagccccagccccgggtgggagacggagtcccagaggtgtcagagacccttaagtcacctgccgaggatgcggggtggatgggggcccgaggctgaagcccctgccttgccacagcccctctcccaggttttgggggccaccgcctgagttacatgtctgtcccccaaatgggtgcccacagcccatccaccagcgtcagagcccgccaggccccactgcaaaaggccacacaatgtaccccgggagtgactcaagggtggccttccctggcctcccctgctgccccccaggagtccggtagccccatgactgtacctcagcttctccatcctcccaggggcccgcgggaggcggagaaccggtgcccaggctgacctcttccgtcttccttccaccctgcagcccgtgtccaggagccccgccaggtgcccgcgccaggccctcagtcttcctgccggttccgcccgccctcccggagaggtggccgccatgcttctgtgccgaccacgccccaggacctccggagcgccctgcagggccgggcagggggacagcagggaccgggcgcagccctcccccctcggccgcccggcagtgcacgcggcttgttgacttcgcagccccgggcggagccttcccgggcgggcgtgggaggagggaggcggcctccatgcactttatgtggagactactggccccgcccgtggcctcgtgctccgcagggcgcccagcgccgtccggcggccccgccgcagaccagctggcgggtgtggagaccaggctcctgaccccgccatgcatgcagcgccacctggaagccgcgcggccgctttggttttttgtttggttggttccattttctttttttctttttttttttaagaaaaaataaaaggtggatttgagctgtggctgtgaggggtgtttgggagctgctgggtggcaggggggctgtggggtcgggctcacgtcgcggccgcctttgcgctctcgggtcaccctgctttggcggcccggccggagggcaggaccctcacctctcccccaaggccactgcgctcttgggaccccagagaaaacccggagcaagcaggagtgtgcggtcaatatttatatcatccagaaaagaaaaacacgagaaacgccatcgcgggatggtgcagacgcggcggggactcggagggtgccgtgcgggcgaggccgcccaaatttggcaataaataaagcttgggaagcttggacctggccgtctgggttttgttcgcgtctcaacgtggatggggcggcagcggggcgggcgccgttgacatgcggagggcagtggggactcggggcgcgggagggccggggccggctccctcagggccggcggcagcagcggtggcggcgcggttattgctcggaggcggcgcgggctgccgccagcacacgccgcagtgaggtaaacggtctcggaggtcggcagtcacggtgttgagccgcctcccggcccagggcggcgaactcgtctgcgaccgttagcgccccgcggcccccgcccgggcgagctcgcgcacgcgcccggcacgcggcggctccatcgggcccagtgggctgcgcgaccctcgggtggcgggccctgcgactaagcggccgccccgtccgggactgagggcgagtgatcgttgtcctcaggagcccgaagctgagagccgttcacgccccttccttcccgcccagccggggtctccgcggcccgcgcctca

SEQ ID NO: 687 - DNA, 1500 bp, Homo sapiens
cccgccgcagaccagctggcgggtgtggagaccaggctcctgaccccgccatgcatgcagcgccacctggaagccgcgcggccgctttggttttttgtttggttggttccattttctttttttctttttttttttaagaaaaaataaaaggtggatttgagctgtggctgtgaggggtgtttgggagctgctgggtggcaggggggctgtggggtcgggctcacgtcgcggccgcctttgcgctctcgggtcaccctgctttggcggcccggccggagggcaggaccctcacctctcccccaaggccactgcgctcttgggaccccagagaaaacccggagcaagcaggagtgtgcggtcaatatttatatcatccagaaaagaaaaacacgagaaacgccatcgcgggatggtgcagacgcggcggggactcggagggtgccgtgcgggcgaggccgcccaaatttggcaataaataaagcttgggaagcttggacctggccgtctgggttttgttcgcgtctcaacgtggatggggcggcagcggggcgggcgccgttgacatgcggagggcagtggggactcggggcgcgggagggccggggccggctccctcagggccggcggcagcagcggtggcggcgcggttattgctcggaggcggcgcgggctgccgccagcacacgccgcagtgaggtaaacggtctcggaggtcggcagtcacggtgttgagccgcctcccggcccagggcggcgaactcgtctgcgaccgttagcgccccgcggcccccgcccgggcgagctcgcgcacgcgcccggcacgcggcggctccatcgggcccagtgggctgcgcgaccctcgggtggcgggccctgcgactaagcggccgccccgtccgggactgagggcgagtgatcgttgtcctcaggagcccgaagctgagagccgttcacgccccttccttcccgcccagccggggtctccgcggcccgcgcctcacgacgcccagcacccggcaagcaccggaaagagcagtgcacacttcggcggcgcgagggcggccggggctctgcgcctgcgccctgaagcggcgagcgcgcctccgtcgcccggcgcgtgcgcgaagggcccgcggtccccgcgcattcgcgtcggggcgtcgcgcccccacgtctctcccgccgccgaggccccgtgcggcgccggagaagctgccagagagatgggcccaggacgcgggacttaggccgggctgtggtcgggggacgtgggggcggcggcgaccaacgcgggagtcgccacgacgggctcggcgaggcgcggcggaaagagtctctcgtcgaggccagccgccagcttgtccagcaccgacccggatggtaggacgcacaggcccgagccggggcaccccccgccgcccggctcctcctcgatgacggggatggcggggtcgtcgccggcgccgcccagggtgcgaccgtcgggcgggccgtccacgc

SEQ ID NO: 688 - DNA, 4593 bp, Homo sapiens
agaggaggaggaagccggaagtgcatcggccccgggtctgtccgggcgttgcgggattggggcctgggaacgctcggcccccggcagccgagaagcccgtgactgggctgagcagcaccatcccagccctggggcctgctgactgcccagtcccggcttcacctgcagcgaacccggagcgttgctatcctccaccggactgtcaggctctgcgcgccccgcggaggtcggcggcgaccagcagcgactgcggagcgacggcgggcggccccgggcatgtacgcccccggaggcgcagggctgcccggcgggcgccggcggaggagcccgggaggcagcgctctgcccaagcagccggagcgtagcctggcctcggccctgcctggcgccctgtctatcacggcgctgtgcactgccctcgccgagcccgcctggttgcacatccacggaggcacctgttcgcgccaggagctgggggtctccgacgtgttgggctatgtgcacccggacctgctgaaagatttctgcatgaatccccagacagtgctgctcctgcgggtcatcgccgccttctgtttcctgggcatcctgtgtagtctctccgctttccttctggatgtctttgggccgaagcatcctgctctgaagatcactcgtcgctatgccttcgcccatatcctaacggttctgcagtgtgccaccgtcattggcttttcttattgggcttctgaactcatcttggcccagcagcagcagcataagaagtaccatggatcccaggtctatgtcaccttcgccgttagcttctacctggtggcaggagctggtggagcctcaatcctggccacggcagccaacctcctgcgccactaccccacagaggaagaggagcaggcgctggagctgctctcagagatggaagagaacgagccctacccggcggaatatgaggtcatcaaccagttccagccaccccctgcttacacaccctaatgccagccctgggctctcttcctcggcagcccctccctcaactctgcagctcctctcgcacccagaggagctcctttccccagcaggcctcactggtaggatcctgaccatcttctccaaaccttccccaggagagactctgcctttagggtcatccaagtatccctgctctcagaaccggaggtccactggttttctataatgtactctttccctcctgccacatcctgcccccttcacattcacgagtcattaccagccagggaaggtcatccaagtttcctccagcatgggcgatatctttgggaccgagactttccttggagagctgctgagagcggacagtcccaaaaacaagtgtcaaagggcccaagggaaaggggactgtgccctggaggctcacttcacagggatcagtgtttgctccacagctgtagctctgggctgacgccccccagaccccttccttctcggagtgacccgcccccaggccacctgctccggggagttctgtgcactttactctttggacttctcctcacgtgtgccctggttttatggggagagggaatcgctgttgggaaggcagagcagttgcaaccctctctgcccttgcttcatgtggctggagcccaggcaaggagagcaggagccagcgtgagactgaggccccctggtgcctatcaaggaccagagtgaaggggactacatctcccagcccttcaccttttaaatatgagtggttttaaaaggaaaaaaatgaaaccaggcaacagcaacaatattctgtttttaaaatagggacaagactgttgtcactttttagacatgtatcccattccttttggctctgcaatatttggggctgtagctccttccaagcccatggtagtccctccccgagtctctcccagtagaatgcagcctcccttccctggccccttccctctcagtgacggtgactccctggggccttctcgtggaacccagaggggctgaggactgtggcctggctggcgggccagcgtggtgctcctcaggactgcagcactgagatggaacctggcctcagtttaggaacaggggccacaacagggcaggaacccaccaccctccacataggaatacaaccagtggggccacatcatgtgaggcatcagacccacactgtcagcccagcaggccgggctgtgtccttcagacccagtgctgccctagactctgactcgggactccagcttgccacgtgccctctcccctcttgaatgtactctggtcttgcagtgtgctgctgggactttcttgctcagccatcactctggtcaccttgtttgctctgggtctggctgaattttctgccctgagatctgggcataaagtggatgaaacttgaaagaccttcagtgtagatccagatggccaacctgtccttgttaagttacttgcttcttgggaatcagtgtcccctgctgagctgaaaaggaaatggattccaatctcttccaacctttaaggtgatagatagtttgagcaagactggagaatggacaacactatgaagctgtggctagaaagggactgtcatgtcccatcctttggccagattgactggggatgtccggacagatgcctgcatgggtggtgagggccacatctgcacacgagccagtggctgcttgcagttcactgctgtgatgccagagtgtgttcaaaggtgactctcctgctcttctggactcttctctcaggcaagaaaggctgcaggctgcctgctatgtgatgcctgagcacaaagccaaggaactgaactaagtctttctgttaagtcctgagtttgtcattggcaggtttacttgtggccagctctctctgcccttgggtgtctgagcaggcagaccagaagaccaggcactggacctgcatgccaaagggactggtcatctcctgaggacctgtaaatgaccctgtggactgttccgcacgatccggaacccactttttattcactccccatgtctttggccttcctcttctttctctttccctctgccatcctgacactgatagtttgtcatataaattccccgggttgtgtttttttttctagaaaaaaattaaaagggaaaacaaaaccaaaaaaaccagaaaccacgaataagaatggaaatgacaatggctgcctgtcatttttctgtcacgattttcctgatttggtttgttccctttgtctcagagaagcaggagatgttgatgaggctgtatttttttttctttttcttgtttttgagacaagagtctcgctctgtcacccgggctggagtgtaacgtggcatgatctcagctcactgcaacctctgcctcctgggttcaagcgattatcctgcctcagcctcctgagtagctgggattacaggcatgcgccactatgcccagataatttttttgtatttttagtagagacagggtttcaccatgttggccaggctggtctggaactcctaacctcaggttatccacccaccttggcctcccaaagtgctgggattataggcatgaaccaccgtgcctggccaaagatgtaatttaaaatagttagaagggacttggcatgggccagctccgtgcatggcattttcacccccagagcttcctaatcctgttttcacacaggaagtttctaggtctttctagaacagctagaaatagtagctgactcccgcccaaggcccaaccttcaaaccctgagctcttcaggctgcatcctctggtgagctatagaggagaacgtggctcctaaactctagccatcctgtgggaggaaatagacttctttgggctgtggcttgcagaacaaactacactttttttccctctattgtttaaattttatttaataatttgtgtgtttttctgtctttattttctgtatttcacgtgttccttcactccctagaaactgcactttctttgaaaccataggtaatgaatcttactaggagaggcatggggatagagacagttctgggagtgtgacctgtaagcctcctgtagggcagtgccaggccttgattgcccacgttctctccgttccttcttccttcatacatttgatcacacagcctacacccagccccgagtgtgcatcacggtaaaagagctgagggctctcttcagggagcagcccatttaggtctcttttgttgttgttagggagaatacacatctttcttggaagctgggagtgtgttctcatttcatgtccattcagacaaagcaccattaggcaccatgaaatatacagtgacggacaggaccctgtctgcaaggattttatgtccttagttcaggagatggacttgtccacagaaaggcagagtgaagtgggcggccggctcggaaaagtcctgtgcccagaagggagccagttctgacctgagtgataatgaaaggcttcctggaggacgcagcttgagccacacttgatgtgggagtgaactgggatagggacactcctgctgagagaatggcaagagcaaaagcacactggtggccaggaggtggtaagagccgaggttagaaaggtgaggggtgctcatttaa

SEQ ID NO: 689 - DNA, 4570 bp, Homo sapiens
agaggaggaggaagccggaagtgcatcggccccgggtctgtccgggcgttgcgggattggggcctgggaacgctcggcccccggcagccgagaagcccgtgactgggctgagcagcaccatcccagccctggggcctgctgactgcgaacccggagcgttgctatcctccaccggactgtcaggctctgcgcgccccgcggaggtcggcggcgaccagcagcgactgcggagcgacggcgggcggccccgggcatgtacgcccccggaggcgcagggctgcccggcgggcgccggcggaggagcccgggaggcagcgctctgcccaagcagccggagcgtagcctggcctcggccctgcctggcgccctgtctatcacggcgctgtgcactgccctcgccgagcccgcctggttgcacatccacggaggcacctgttcgcgccaggagctgggggtctccgacgtgttgggctatgtgcacccggacctgctgaaagatttctgcatgaatccccagacagtgctgctcctgcgggtcatcgccgccttctgtttcctgggcatcctgtgtagtctctccgctttccttctggatgtctttgggccgaagcatcctgctctgaagatcactcgtcgctatgccttcgcccatatcctaacggttctgcagtgtgccaccgtcattggcttttcttattgggcttctgaactcatcttggcccagcagcagcagcataagaagtaccatggatcccaggtctatgtcaccttcgccgttagcttctacctggtggcaggagctggtggagcctcaatcctggccacggcagccaacctcctgcgccactaccccacagaggaagaggagcaggcgctggagctgctctcagagatggaagagaacgagccctacccggcggaatatgaggtcatcaaccagttccagccaccccctgcttacacaccctaatgccagccctgggctctcttcctcggcagcccctccctcaactctgcagctcctctcgcacccagaggagctcctttccccagcaggcctcactggtaggatcctgaccatcttctccaaaccttccccaggagagactctgcctttagggtcatccaagtatccctgctctcagaaccggaggtccactggttttctataatgtactctttccctcctgccacatcctgcccccttcacattcacgagtcattaccagccagggaaggtcatccaagtttcctccagcatgggcgatatctttgggaccgagactttccttggagagctgctgagagcggacagtcccaaaaacaagtgtcaaagggcccaagggaaaggggactgtgccctggaggctcacttcacagggatcagtgtttgctccacagctgtagctctgggctgacgccccccagaccccttccttctcggagtgacccgcccccaggccacctgctccggggagttctgtgcactttactctttggacttctcctcacgtgtgccctggttttatggggagagggaatcgctgttgggaaggcagagcagttgcaaccctctctgcccttgcttcatgtggctggagcccaggcaaggagagcaggagccagcgtgagactgaggccccctggtgcctatcaaggaccagagtgaaggggactacatctcccagcccttcaccttttaaatatgagtggttttaaaaggaaaaaaatgaaaccaggcaacagcaacaatattctgtttttaaaatagggacaagactgttgtcactttttagacatgtatcccattccttttggctctgcaatatttggggctgtagctccttccaagcccatggtagtccctccccgagtctctcccagtagaatgcagcctcccttccctggccccttccctctcagtgacggtgactccctggggccttctcgtggaacccagaggggctgaggactgtggcctggctggcgggccagcgtggtgctcctcaggactgcagcactgagatggaacctggcctcagtttaggaacaggggccacaacagggcaggaacccaccaccctccacataggaatacaaccagtggggccacatcatgtgaggcatcagacccacactgtcagcccagcaggccgggctgtgtccttcagacccagtgctgccctagactctgactcgggactccagcttgccacgtgccctctcccctcttgaatgtactctggtcttgcagtgtgctgctgggactttcttgctcagccatcactctggtcaccttgtttgctctgggtctggctgaattttctgccctgagatctgggcataaagtggatgaaacttgaaagaccttcagtgtagatccagatggccaacctgtccttgttaagttacttgcttcttgggaatcagtgtcccctgctgagctgaaaaggaaatggattccaatctcttccaacctttaaggtgatagatagtttgagcaagactggagaatggacaacactatgaagctgtggctagaaagggactgtcatgtcccatcctttggccagattgactggggatgtccggacagatgcctgcatgggtggtgagggccacatctgcacacgagccagtggctgcttgcagttcactgctgtgatgccagagtgtgttcaaaggtgactctcctgctcttctggactcttctctcaggcaagaaaggctgcaggctgcctgctatgtgatgcctgagcacaaagccaaggaactgaactaagtctttctgttaagtcctgagtttgtcattggcaggtttacttgtggccagctctctctgcccttgggtgtctgagcaggcagaccagaagaccaggcactggacctgcatgccaaagggactggtcatctcctgaggacctgtaaatgaccctgtggactgttccgcacgatccggaacccactttttattcactccccatgtctttggccttcctcttctttctctttccctctgccatcctgacactgatagtttgtcatataaattccccgggttgtgtttttttttctagaaaaaaattaaaagggaaaacaaaaccaaaaaaaccagaaaccacgaataagaatggaaatgacaatggctgcctgtcatttttctgtcacgattttcctgatttggtttgttccctttgtctcagagaagcaggagatgttgatgaggctgtatttttttttctttttcttgtttttgagacaagagtctcgctctgtcacccgggctggagtgtaacgtggcatgatctcagctcactgcaacctctgcctcctgggttcaagcgattatcctgcctcagcctcctgagtagctgggattacaggcatgcgccactatgcccagataatttttttgtatttttagtagagacagggtttcaccatgttggccaggctggtctggaactcctaacctcaggttatccacccaccttggcctcccaaagtgctgggattataggcatgaaccaccgtgcctggccaaagatgtaatttaaaatagttagaagggacttggcatgggccagctccgtgcatggcattttcacccccagagcttcctaatcctgttttcacacaggaagtttctaggtctttctagaacagctagaaatagtagctgactcccgcccaaggcccaaccttcaaaccctgagctcttcaggctgcatcctctggtgagctatagaggagaacgtggctcctaaactctagccatcctgtgggaggaaatagacttctttgggctgtggcttgcagaacaaactacactttttttccctctattgtttaaattttatttaataatttgtgtgtttttctgtctttattttctgtatttcacgtgttccttcactccctagaaactgcactttctttgaaaccataggtaatgaatcttactaggagaggcatggggatagagacagttctgggagtgtgacctgtaagcctcctgtagggcagtgccaggccttgattgcccacgttctctccgttccttcttccttcatacatttgatcacacagcctacacccagccccgagtgtgcatcacggtaaaagagctgagggctctcttcagggagcagcccatttaggtctcttttgttgttgttagggagaatacacatctttcttggaagctgggagtgtgttctcatttcatgtccattcagacaaagcaccattaggcaccatgaaatatacagtgacggacaggaccctgtctgcaaggattttatgtccttagttcaggagatggacttgtccacagaaaggcagagtgaagtgggcggccggctcggaaaagtcctgtgcccagaagggagccagttctgacctgagtgataatgaaaggcttcctggaggacgcagcttgagccacacttgatgtgggagtgaactgggatagggacactcctgctgagagaatggcaagagcaaaagcacactggtggccaggaggtggtaagagccgaggttagaaaggtgaggggtgctcatttaa

SEQ ID NO: 690 - DNA, 2586 bp, Homo sapiens
gattggggttttcccctcccatgtgctcaagactggcgctaaaagttttgagcttctcaaaagtctagagccaccgtccagggagcaggtagctgctgggctccggggacactttgcgttcgggctgggagcgtgctttccacgacggtgacacgcttccctggattggcagccagactgccttccgggtcactgccatggaggagccgcagtcagatcctagcgtcgagccccctctgagtcaggaaacattttcagacctatggaaactacttcctgaaaacaacgttctgtcccccttgccgtcccaagcaatggatgatttgatgctgtccccggacgatattgaacaatggttcactgaagacccaggtccagatgaagctcccagaatgccagaggctgctccccccgtggcccctgcaccagcagctcctacaccggcggcccctgcaccagccccctcctggcccctgtcatcttctgtcccttcccagaaaacctaccagggcagctacggtttccgtctgggcttcttgcattctgggacagccaagtctgtgacttgcacgtactcccctgccctcaacaagatgttttgccaactggccaagacctgccctgtgcagctgtgggttgattccacacccccgcccggcacccgcgtccgcgccatggccatctacaagcagtcacagcacatgacggaggttgtgaggcgctgcccccaccatgagcgctgctcagatagcgatggtctggcccctcctcagcatcttatccgagtggaaggaaatttgcgtgtggagtatttggatgacagaaacacttttcgacatagtgtggtggtgccctatgagccgcctgaggttggctctgactgtaccaccatccactacaactacatgtgtaacagttcctgcatgggcggcatgaaccggaggcccatcctcaccatcatcacactggaagactccagtggtaatctactgggacggaacagctttgaggtgcgtgtttgtgcctgtcctgggagagaccggcgcacagaggaagagaatctccgcaagaaaggggagcctcaccacgagctgcccccagggagcactaagcgagcactgcccaacaacaccagctcctctccccagccaaagaagaaaccactggatggagaatatttcacccttcagatccgtgggcgtgagcgcttcgagatgttccgagagctgaatgaggccttggaactcaaggatgcccaggctgggaaggagccaggggggagcagggctcactccagccacctgaagtccaaaaagggtcagtctacctcccgccataaaaaactcatgttcaagacagaagggcctgactcagactgacattctccacttcttgttccccactgacagcctcccacccccatctctccctcccctgccattttgggttttgggtctttgaacccttgcttgcaataggtgtgcgtcagaagcacccaggacttccatttgctttgtcccggggctccactgaacaagttggcctgcactggtgttttgttgtggggaggaggatggggagtaggacataccagcttagattttaaggtttttactgtgagggatgtttgggagatgtaagaaatgttcttgcagttaagggttagtttacaatcagccacattctaggtaggggcccacttcaccgtactaaccagggaagctgtccctcactgttgaattttctctaacttcaaggcccatatctgtgaaatgctggcatttgcacctacctcacagagtgcattgtgagggttaatgaaataatgtacatctggccttgaaaccaccttttattacatggggtctagaacttgacccccttgagggtgcttgttccctctccctgttggtcggtgggttggtagtttctacagttgggcagctggttaggtagagggagttgtcaagtctctgctggcccagccaaaccctgtctgacaacctcttggtgaaccttagtacctaaaaggaaatctcaccccatcccacaccctggaggatttcatctcttgtatatgatgatctggatccaccaagacttgttttatgctcagggtcaatttcttttttcttttttttttttttttttctttttctttgagactgggtctcgctttgttgcccaggctggagtggagtggcgtgatcttggcttactgcagcctttgcctccccggctcgagcagtcctgcctcagcctccggagtagctgggaccacaggttcatgccaccatggccagccaacttttgcatgttttgtagagatggggtctcacagtgttgcccaggctggtctcaaactcctgggctcaggcgatccacctgtctcagcctcccagagtgctgggattacaattgtgagccaccacgtccagctggaagggtcaacatcttttacattctgcaagcacatctgcattttcaccccacccttcccctccttctccctttttatatcccatttttatatcgatctcttattttacaataaaactttgctgccacctgtgtgtctgaggggtg

SEQ ID NO: 691 - DNA, 2588 bp, Homo sapiens
gatgggattggggttttcccctcccatgtgctcaagactggcgctaaaagttttgagcttctcaaaagtctagagccaccgtccagggagcaggtagctgctgggctccggggacactttgcgttcgggctgggagcgtgctttccacgacggtgacacgcttccctggattggccagactgccttccgggtcactgccatggaggagccgcagtcagatcctagcgtcgagccccctctgagtcaggaaacattttcagacctatggaaactacttcctgaaaacaacgttctgtcccccttgccgtcccaagcaatggatgatttgatgctgtccccggacgatattgaacaatggttcactgaagacccaggtccagatgaagctcccagaatgccagaggctgctccccccgtggcccctgcaccagcagctcctacaccggcggcccctgcaccagccccctcctggcccctgtcatcttctgtcccttcccagaaaacctaccagggcagctacggtttccgtctgggcttcttgcattctgggacagccaagtctgtgacttgcacgtactcccctgccctcaacaagatgttttgccaactggccaagacctgccctgtgcagctgtgggttgattccacacccccgcccggcacccgcgtccgcgccatggccatctacaagcagtcacagcacatgacggaggttgtgaggcgctgcccccaccatgagcgctgctcagatagcgatggtctggcccctcctcagcatcttatccgagtggaaggaaatttgcgtgtggagtatttggatgacagaaacacttttcgacatagtgtggtggtgccctatgagccgcctgaggttggctctgactgtaccaccatccactacaactacatgtgtaacagttcctgcatgggcggcatgaaccggaggcccatcctcaccatcatcacactggaagactccagtggtaatctactgggacggaacagctttgaggtgcgtgtttgtgcctgtcctgggagagaccggcgcacagaggaagagaatctccgcaagaaaggggagcctcaccacgagctgcccccagggagcactaagcgagcactgcccaacaacaccagctcctctccccagccaaagaagaaaccactggatggagaatatttcacccttcagatccgtgggcgtgagcgcttcgagatgttccgagagctgaatgaggccttggaactcaaggatgcccaggctgggaaggagccaggggggagcagggctcactccagccacctgaagtccaaaaagggtcagtctacctcccgccataaaaaactcatgttcaagacagaagggcctgactcagactgacattctccacttcttgttccccactgacagcctcccacccccatctctccctcccctgccattttgggttttgggtctttgaacccttgcttgcaataggtgtgcgtcagaagcacccaggacttccatttgctttgtcccggggctccactgaacaagttggcctgcactggtgttttgttgtggggaggaggatggggagtaggacataccagcttagattttaaggtttttactgtgagggatgtttgggagatgtaagaaatgttcttgcagttaagggttagtttacaatcagccacattctaggtaggggcccacttcaccgtactaaccagggaagctgtccctcactgttgaattttctctaacttcaaggcccatatctgtgaaatgctggcatttgcacctacctcacagagtgcattgtgagggttaatgaaataatgtacatctggccttgaaaccaccttttattacatggggtctagaacttgacccccttgagggtgcttgttccctctccctgttggtcggtgggttggtagtttctacagttgggcagctggttaggtagagggagttgtcaagtctctgctggcccagccaaaccctgtctgacaacctcttggtgaaccttagtacctaaaaggaaatctcaccccatcccacaccctggaggatttcatctcttgtatatgatgatctggatccaccaagacttgttttatgctcagggtcaatttcttttttcttttttttttttttttttctttttctttgagactgggtctcgctttgttgcccaggctggagtggagtggcgtgatcttggcttactgcagcctttgcctccccggctcgagcagtcctgcctcagcctccggagtagctgggaccacaggttcatgccaccatggccagccaacttttgcatgttttgtagagatggggtctcacagtgttgcccaggctggtctcaaactcctgggctcaggcgatccacctgtctcagcctcccagagtgctgggattacaattgtgagccaccacgtccagctggaagggtcaacatcttttacattctgcaagcacatctgcattttcaccccacccttcccctccttctccctttttatatcccatttttatatcgatctcttattttacaataaaactttgctgccacctgtgtgtctgaggggtg

SEQ ID NO: 692 - DNA, 2719 bp, Homo sapiens
gattggggttttcccctcccatgtgctcaagactggcgctaaaagttttgagcttctcaaaagtctagagccaccgtccagggagcaggtagctgctgggctccggggacactttgcgttcgggctgggagcgtgctttccacgacggtgacacgcttccctggattggcagccagactgccttccgggtcactgccatggaggagccgcagtcagatcctagcgtcgagccccctctgagtcaggaaacattttcagacctatggaaactacttcctgaaaacaacgttctgtcccccttgccgtcccaagcaatggatgatttgatgctgtccccggacgatattgaacaatggttcactgaagacccaggtccagatgaagctcccagaatgccagaggctgctccccccgtggcccctgcaccagcagctcctacaccggcggcccctgcaccagccccctcctggcccctgtcatcttctgtcccttcccagaaaacctaccagggcagctacggtttccgtctgggcttcttgcattctgggacagccaagtctgtgacttgcacgtactcccctgccctcaacaagatgttttgccaactggccaagacctgccctgtgcagctgtgggttgattccacacccccgcccggcacccgcgtccgcgccatggccatctacaagcagtcacagcacatgacggaggttgtgaggcgctgcccccaccatgagcgctgctcagatagcgatggtctggcccctcctcagcatcttatccgagtggaaggaaatttgcgtgtggagtatttggatgacagaaacacttttcgacatagtgtggtggtgccctatgagccgcctgaggttggctctgactgtaccaccatccactacaactacatgtgtaacagttcctgcatgggcggcatgaaccggaggcccatcctcaccatcatcacactggaagactccagtggtaatctactgggacggaacagctttgaggtgcgtgtttgtgcctgtcctgggagagaccggcgcacagaggaagagaatctccgcaagaaaggggagcctcaccacgagctgcccccagggagcactaagcgagcactgcccaacaacaccagctcctctccccagccaaagaagaaaccactggatggagaatatttcacccttcaggaccagaccagctttcaaaaagaaaattgttaaagagagcatgaaaatggttctatgactttgcctgatacagatgctacttgacttacgatggtgttacttcctgataaactcgtcgtaagttgaaaatattatccgtgggcgtgagcgcttcgagatgttccgagagctgaatgaggccttggaactcaaggatgcccaggctgggaaggagccaggggggagcagggctcactccagccacctgaagtccaaaaagggtcagtctacctcccgccataaaaaactcatgttcaagacagaagggcctgactcagactgacattctccacttcttgttccccactgacagcctcccacccccatctctccctcccctgccattttgggttttgggtctttgaacccttgcttgcaataggtgtgcgtcagaagcacccaggacttccatttgctttgtcccggggctccactgaacaagttggcctgcactggtgttttgttgtggggaggaggatggggagtaggacataccagcttagattttaaggtttttactgtgagggatgtttgggagatgtaagaaatgttcttgcagttaagggttagtttacaatcagccacattctaggtaggggcccacttcaccgtactaaccagggaagctgtccctcactgttgaattttctctaacttcaaggcccatatctgtgaaatgctggcatttgcacctacctcacagagtgcattgtgagggttaatgaaataatgtacatctggccttgaaaccaccttttattacatggggtctagaacttgacccccttgagggtgcttgttccctctccctgttggtcggtgggttggtagtttctacagttgggcagctggttaggtagagggagttgtcaagtctctgctggcccagccaaaccctgtctgacaacctcttggtgaaccttagtacctaaaaggaaatctcaccccatcccacaccctggaggatttcatctcttgtatatgatgatctggatccaccaagacttgttttatgctcagggtcaatttcttttttcttttttttttttttttttctttttctttgagactgggtctcgctttgttgcccaggctggagtggagtggcgtgatcttggcttactgcagcctttgcctccccggctcgagcagtcctgcctcagcctccggagtagctgggaccacaggttcatgccaccatggccagccaacttttgcatgttttgtagagatggggtctcacagtgttgcccaggctggtctcaaactcctgggctcaggcgatccacctgtctcagcctcccagagtgctgggattacaattgtgagccaccacgtccagctggaagggtcaacatcttttacattctgcaagcacatctgcattttcaccccacccttcccctccttctccctttttatatcccatttttatatcgatctcttattttacaataaaactttgctgccacctgtgtgtctgaggggtg

SEQ ID NO: 693 - DNA, 2646 bp, Homo sapiens
gattggggttttcccctcccatgtgctcaagactggcgctaaaagttttgagcttctcaaaagtctagagccaccgtccagggagcaggtagctgctgggctccggggacactttgcgttcgggctgggagcgtgctttccacgacggtgacacgcttccctggattggcagccagactgccttccgggtcactgccatggaggagccgcagtcagatcctagcgtcgagccccctctgagtcaggaaacattttcagacctatggaaactacttcctgaaaacaacgttctgtcccccttgccgtcccaagcaatggatgatttgatgctgtccccggacgatattgaacaatggttcactgaagacccaggtccagatgaagctcccagaatgccagaggctgctccccccgtggcccctgcaccagcagctcctacaccggcggcccctgcaccagccccctcctggcccctgtcatcttctgtcccttcccagaaaacctaccagggcagctacggtttccgtctgggcttcttgcattctgggacagccaagtctgtgacttgcacgtactcccctgccctcaacaagatgttttgccaactggccaagacctgccctgtgcagctgtgggttgattccacacccccgcccggcacccgcgtccgcgccatggccatctacaagcagtcacagcacatgacggaggttgtgaggcgctgcccccaccatgagcgctgctcagatagcgatggtctggcccctcctcagcatcttatccgagtggaaggaaatttgcgtgtggagtatttggatgacagaaacacttttcgacatagtgtggtggtgccctatgagccgcctgaggttggctctgactgtaccaccatccactacaactacatgtgtaacagttcctgcatgggcggcatgaaccggaggcccatcctcaccatcatcacactggaagactccagtggtaatctactgggacggaacagctttgaggtgcgtgtttgtgcctgtcctgggagagaccggcgcacagaggaagagaatctccgcaagaaaggggagcctcaccacgagctgcccccagggagcactaagcgagcactgcccaacaacaccagctcctctccccagccaaagaagaaaccactggatggagaatatttcacccttcagatgctacttgacttacgatggtgttacttcctgataaactcgtcgtaagttgaaaatattatccgtgggcgtgagcgcttcgagatgttccgagagctgaatgaggccttggaactcaaggatgcccaggctgggaaggagccaggggggagcagggctcactccagccacctgaagtccaaaaagggtcagtctacctcccgccataaaaaactcatgttcaagacagaagggcctgactcagactgacattctccacttcttgttccccactgacagcctcccacccccatctctccctcccctgccattttgggttttgggtctttgaacccttgcttgcaataggtgtgcgtcagaagcacccaggacttccatttgctttgtcccggggctccactgaacaagttggcctgcactggtgttttgttgtggggaggaggatggggagtaggacataccagcttagattttaaggtttttactgtgagggatgtttgggagatgtaagaaatgttcttgcagttaagggttagtttacaatcagccacattctaggtaggggcccacttcaccgtactaaccagggaagctgtccctcactgttgaattttctctaacttcaaggcccatatctgtgaaatgctggcatttgcacctacctcacagagtgcattgtgagggttaatgaaataatgtacatctggccttgaaaccaccttttattacatggggtctagaacttgacccccttgagggtgcttgttccctctccctgttggtcggtgggttggtagtttctacagttgggcagctggttaggtagagggagttgtcaagtctctgctggcccagccaaaccctgtctgacaacctcttggtgaaccttagtacctaaaaggaaatctcaccccatcccacaccctggaggatttcatctcttgtatatgatgatctggatccaccaagacttgttttatgctcagggtcaatttcttttttcttttttttttttttttttctttttctttgagactgggtctcgctttgttgcccaggctggagtggagtggcgtgatcttggcttactgcagcctttgcctccccggctcgagcagtcctgcctcagcctccggagtagctgggaccacaggttcatgccaccatggccagccaacttttgcatgttttgtagagatggggtctcacagtgttgcccaggctggtctcaaactcctgggctcaggcgatccacctgtctcagcctcccagagtgctgggattacaattgtgagccaccacgtccagctggaagggtcaacatcttttacattctgcaagcacatctgcattttcaccccacccttcccctccttctccctttttatatcccatttttatatcgatctcttattttacaataaaactttgctgccacctgtgtgtctgaggggtg

SEQ ID NO: 694 - DNA, 2271 bp, Homo sapiens
tgaggccaggagatggaggctgcagtgagctgtgatcacaccactgtgctccagcctgagtgacagagcaagaccctatctcaaaaaaaaaaaaaaaaaagaaaagctcctgaggtgtagacgccaactctctctagctcgctagtgggttgcaggaggtgcttacgcatgtttgtttctttgctgccgtcttccagttgctttatctgttcacttgtgccctgactttcaactctgtctccttcctcttcctacagtactcccctgccctcaacaagatgttttgccaactggccaagacctgccctgtgcagctgtgggttgattccacacccccgcccggcacccgcgtccgcgccatggccatctacaagcagtcacagcacatgacggaggttgtgaggcgctgcccccaccatgagcgctgctcagatagcgatggtctggcccctcctcagcatcttatccgagtggaaggaaatttgcgtgtggagtatttggatgacagaaacacttttcgacatagtgtggtggtgccctatgagccgcctgaggttggctctgactgtaccaccatccactacaactacatgtgtaacagttcctgcatgggcggcatgaaccggaggcccatcctcaccatcatcacactggaagactccagtggtaatctactgggacggaacagctttgaggtgcgtgtttgtgcctgtcctgggagagaccggcgcacagaggaagagaatctccgcaagaaaggggagcctcaccacgagctgcccccagggagcactaagcgagcactgcccaacaacaccagctcctctccccagccaaagaagaaaccactggatggagaatatttcacccttcagatccgtgggcgtgagcgcttcgagatgttccgagagctgaatgaggccttggaactcaaggatgcccaggctgggaaggagccaggggggagcagggctcactccagccacctgaagtccaaaaagggtcagtctacctcccgccataaaaaactcatgttcaagacagaagggcctgactcagactgacattctccacttcttgttccccactgacagcctcccacccccatctctccctcccctgccattttgggttttgggtctttgaacccttgcttgcaataggtgtgcgtcagaagcacccaggacttccatttgctttgtcccggggctccactgaacaagttggcctgcactggtgttttgttgtggggaggaggatggggagtaggacataccagcttagattttaaggtttttactgtgagggatgtttgggagatgtaagaaatgttcttgcagttaagggttagtttacaatcagccacattctaggtaggggcccacttcaccgtactaaccagggaagctgtccctcactgttgaattttctctaacttcaaggcccatatctgtgaaatgctggcatttgcacctacctcacagagtgcattgtgagggttaatgaaataatgtacatctggccttgaaaccaccttttattacatggggtctagaacttgacccccttgagggtgcttgttccctctccctgttggtcggtgggttggtagtttctacagttgggcagctggttaggtagagggagttgtcaagtctctgctggcccagccaaaccctgtctgacaacctcttggtgaaccttagtacctaaaaggaaatctcaccccatcccacaccctggaggatttcatctcttgtatatgatgatctggatccaccaagacttgttttatgctcagggtcaatttcttttttcttttttttttttttttttctttttctttgagactgggtctcgctttgttgcccaggctggagtggagtggcgtgatcttggcttactgcagcctttgcctccccggctcgagcagtcctgcctcagcctccggagtagctgggaccacaggttcatgccaccatggccagccaacttttgcatgttttgtagagatggggtctcacagtgttgcccaggctggtctcaaactcctgggctcaggcgatccacctgtctcagcctcccagagtgctgggattacaattgtgagccaccacgtccagctggaagggtcaacatcttttacattctgcaagcacatctgcattttcaccccacccttcccctccttctccctttttatatcccatttttatatcgatctcttattttacaataaaactttgctgccacctgtgtgtctgaggggtg

SEQ ID NO: 695 - DNA, 2404 bp, Homo sapiens
tgaggccaggagatggaggctgcagtgagctgtgatcacaccactgtgctccagcctgagtgacagagcaagaccctatctcaaaaaaaaaaaaaaaaaagaaaagctcctgaggtgtagacgccaactctctctagctcgctagtgggttgcaggaggtgcttacgcatgtttgtttctttgctgccgtcttccagttgctttatctgttcacttgtgccctgactttcaactctgtctccttcctcttcctacagtactcccctgccctcaacaagatgttttgccaactggccaagacctgccctgtgcagctgtgggttgattccacacccccgcccggcacccgcgtccgcgccatggccatctacaagcagtcacagcacatgacggaggttgtgaggcgctgcccccaccatgagcgctgctcagatagcgatggtctggcccctcctcagcatcttatccgagtggaaggaaatttgcgtgtggagtatttggatgacagaaacacttttcgacatagtgtggtggtgccctatgagccgcctgaggttggctctgactgtaccaccatccactacaactacatgtgtaacagttcctgcatgggcggcatgaaccggaggcccatcctcaccatcatcacactggaagactccagtggtaatctactgggacggaacagctttgaggtgcgtgtttgtgcctgtcctgggagagaccggcgcacagaggaagagaatctccgcaagaaaggggagcctcaccacgagctgcccccagggagcactaagcgagcactgcccaacaacaccagctcctctccccagccaaagaagaaaccactggatggagaatatttcacccttcaggaccagaccagctttcaaaaagaaaattgttaaagagagcatgaaaatggttctatgactttgcctgatacagatgctacttgacttacgatggtgttacttcctgataaactcgtcgtaagttgaaaatattatccgtgggcgtgagcgcttcgagatgttccgagagctgaatgaggccttggaactcaaggatgcccaggctgggaaggagccaggggggagcagggctcactccagccacctgaagtccaaaaagggtcagtctacctcccgccataaaaaactcatgttcaagacagaagggcctgactcagactgacattctccacttcttgttccccactgacagcctcccacccccatctctccctcccctgccattttgggttttgggtctttgaacccttgcttgcaataggtgtgcgtcagaagcacccaggacttccatttgctttgtcccggggctccactgaacaagttggcctgcactggtgttttgttgtggggaggaggatggggagtaggacataccagcttagattttaaggtttttactgtgagggatgtttgggagatgtaagaaatgttcttgcagttaagggttagtttacaatcagccacattctaggtaggggcccacttcaccgtactaaccagggaagctgtccctcactgttgaattttctctaacttcaaggcccatatctgtgaaatgctggcatttgcacctacctcacagagtgcattgtgagggttaatgaaataatgtacatctggccttgaaaccaccttttattacatggggtctagaacttgacccccttgagggtgcttgttccctctccctgttggtcggtgggttggtagtttctacagttgggcagctggttaggtagagggagttgtcaagtctctgctggcccagccaaaccctgtctgacaacctcttggtgaaccttagtacctaaaaggaaatctcaccccatcccacaccctggaggatttcatctcttgtatatgatgatctggatccaccaagacttgttttatgctcagggtcaatttcttttttcttttttttttttttttttctttttctttgagactgggtctcgctttgttgcccaggctggagtggagtggcgtgatcttggcttactgcagcctttgcctccccggctcgagcagtcctgcctcagcctccggagtagctgggaccacaggttcatgccaccatggccagccaacttttgcatgttttgtagagatggggtctcacagtgttgcccaggctggtctcaaactcctgggctcaggcgatccacctgtctcagcctcccagagtgctgggattacaattgtgagccaccacgtccagctggaagggtcaacatcttttacattctgcaagcacatctgcattttcaccccacccttcccctccttctccctttttatatcccatttttatatcgatctcttattttacaataaaactttgctgccacctgtgtgtctgaggggtg

SEQ ID NO: 696 - DNA, 2331 bp, Homo sapiens
tgaggccaggagatggaggctgcagtgagctgtgatcacaccactgtgctccagcctgagtgacagagcaagaccctatctcaaaaaaaaaaaaaaaaaagaaaagctcctgaggtgtagacgccaactctctctagctcgctagtgggttgcaggaggtgcttacgcatgtttgtttctttgctgccgtcttccagttgctttatctgttcacttgtgccctgactttcaactctgtctccttcctcttcctacagtactcccctgccctcaacaagatgttttgccaactggccaagacctgccctgtgcagctgtgggttgattccacacccccgcccggcacccgcgtccgcgccatggccatctacaagcagtcacagcacatgacggaggttgtgaggcgctgcccccaccatgagcgctgctcagatagcgatggtctggcccctcctcagcatcttatccgagtggaaggaaatttgcgtgtggagtatttggatgacagaaacacttttcgacatagtgtggtggtgccctatgagccgcctgaggttggctctgactgtaccaccatccactacaactacatgtgtaacagttcctgcatgggcggcatgaaccggaggcccatcctcaccatcatcacactggaagactccagtggtaatctactgggacggaacagctttgaggtgcgtgtttgtgcctgtcctgggagagaccggcgcacagaggaagagaatctccgcaagaaaggggagcctcaccacgagctgcccccagggagcactaagcgagcactgcccaacaacaccagctcctctccccagccaaagaagaaaccactggatggagaatatttcacccttcagatgctacttgacttacgatggtgttacttcctgataaactcgtcgtaagttgaaaatattatccgtgggcgtgagcgcttcgagatgttccgagagctgaatgaggccttggaactcaaggatgcccaggctgggaaggagccaggggggagcagggctcactccagccacctgaagtccaaaaagggtcagtctacctcccgccataaaaaactcatgttcaagacagaagggcctgactcagactgacattctccacttcttgttccccactgacagcctcccacccccatctctccctcccctgccattttgggttttgggtctttgaacccttgcttgcaataggtgtgcgtcagaagcacccaggacttccatttgctttgtcccggggctccactgaacaagttggcctgcactggtgttttgttgtggggaggaggatggggagtaggacataccagcttagattttaaggtttttactgtgagggatgtttgggagatgtaagaaatgttcttgcagttaagggttagtttacaatcagccacattctaggtaggggcccacttcaccgtactaaccagggaagctgtccctcactgttgaattttctctaacttcaaggcccatatctgtgaaatgctggcatttgcacctacctcacagagtgcattgtgagggttaatgaaataatgtacatctggccttgaaaccaccttttattacatggggtctagaacttgacccccttgagggtgcttgttccctctccctgttggtcggtgggttggtagtttctacagttgggcagctggttaggtagagggagttgtcaagtctctgctggcccagccaaaccctgtctgacaacctcttggtgaaccttagtacctaaaaggaaatctcaccccatcccacaccctggaggatttcatctcttgtatatgatgatctggatccaccaagacttgttttatgctcagggtcaatttcttttttcttttttttttttttttttctttttctttgagactgggtctcgctttgttgcccaggctggagtggagtggcgtgatcttggcttactgcagcctttgcctccccggctcgagcagtcctgcctcagcctccggagtagctgggaccacaggttcatgccaccatggccagccaacttttgcatgttttgtagagatggggtctcacagtgttgcccaggctggtctcaaactcctgggctcaggcgatccacctgtctcagcctcccagagtgctgggattacaattgtgagccaccacgtccagctggaagggtcaacatcttttacattctgcaagcacatctgcattttcaccccacccttcccctccttctccctttttatatcccatttttatatcgatctcttattttacaataaaactttgctgccacctgtgtgtctgaggggtg

SEQ ID NO: 697 - DNA, 1500 bp, Homo sapiens
tcctcttctgggagtaggcagaagactcccgggaggagaggcgaacagcggacgccaattcttttgaaagcactgtgttccttagcaccgcgggtcgctacgggcctcttgctgtcgcgggatttcggtccaccttccgattgggccgccgcatcccggatcagatttcgcgggcgacccacggaacccgcggagccgggacgtgaaaggttagaaggtttcccgttcccatcaagccctagggctcctcgtggctgctgggagttgtagtctgaacgcttctatcttggcgagaagcgcctacgctccccctaccgagtcccgcggtaattcttaaagcacctgcaccgcccccccgccgcctgcagagggcgcagcaggtcttgcacctcttctgcatctcattctccaggcttcagacctgtctccctcattcaaaaaatatttattatcgagctcttacttgctacccagcactgatataggcactcaggaatacaacaatgaataagatagtagaaaaattctatatcctcataaggcttacgtttccatgtactgaaagcaatgaacaaataaatcttatcagagtgataagggttgtgaaggagattaaataagatggtgtgatataaagtatctgggagaaaacgttagggtgtgatattacggaaagccttcctaaaaaatgacattttaactgatgagaagaaaggatccagctgagagcaaacgcaaaagctttcttccttccacccttcatatttgacacaatgcaggattcctccaaaatgatttccaccaattctgccctcacagctctggcttgcagaattttccaccccaaaatgttagtatctacggcaccaggtcggcgagaatcctgactctgcaccctcctccccaactccatttcctttgcttcctccggcaggcggattacttgcccttacttgtcatggcgactgtccagctttgtgccaggagcctcgcaggggttgatgggattggggttttcccctcccatgtgctcaagactggcgctaaaagttttgagcttctcaaaagtctagagccaccgtccagggagcaggtagctgctgggctccggggacactttgcgttcgggctgggagcgtgctttccacgacggtgacacgcttccctggattgggtaagctcctgactgaacttgatgagtcctctctgagtcacgggctctcggctccgtgtattttcagctcgggaaaatcgctggggctgggggtggggcagtggggacttagcgagtttgggggtgagtgggatggaagcttggctagagggatcatcataggagttgcattgttgggagacctgggtgtagatgatggggatgttaggaccatccgaactcaaagttgaacgcctaggcagaggagtggagctttggggaaccttgagccggcctaaagcgtacttctttgcacatccacccggtgctgggcgtagggaatccct

SEQ ID NO: 698 - DNA, 1500 bp, Homo sapiens
ccaccacccccaccccaaccccagccccctagcagagacctgtgggaagcgaaaattccatgggactgactttctgctcttgtctttcagacttcctgaaaacaacgttctggtaaggacaagggttgggctggggacctggagggctggggacctggagggctggggggctggggggctgaggacctggtcctctgactgctcttttcacccatctacagtcccccttgccgtcccaagcaatggatgatttgatgctgtccccggacgatattgaacaatggttcactgaagacccaggtccagatgaagctcccagaatgccagaggctgctccccccgtggcccctgcaccagcagctcctacaccggcggcccctgcaccagccccctcctggcccctgtcatcttctgtcccttcccagaaaacctaccagggcagctacggtttccgtctgggcttcttgcattctgggacagccaagtctgtgacttgcacggtcagttgccctgaggggctggcttccatgagacttcaatgcctggccgtatccccctgcatttcttttgtttggaactttgggattcctcttcaccctttggcttcctgtcagtgtttttttatagtttacccacttaatgtgtgatctctgactcctgtcccaaagttgaatattccccccttgaatttgggcttttatccatcccatcacaccctcagcatctctcctggggatgcagaacttttctttttcttcatccacgtgtattccttggcttttgaaaataagctcctgaccaggcttggtggctcacacctgcaatcccagcactctcaaagaggccaaggcaggcagatcacctgagcccaggagttcaagaccagcctgggtaacatgatgaaacctcgtctctacaaaaaaatacaaaaaattagccaggcatggtggtgcacacctatagtcccagccacttaggaggctgaggtgggaagatcacttgaggccaggagatggaggctgcagtgagctgtgatcacaccactgtgctccagcctgagtgacagagcaagaccctatctcaaaaaaaaaaaaaaaaaagaaaagctcctgaggtgtagacgccaactctctctagctcgctagtgggttgcaggaggtgcttacgcatgtttgtttctttgctgccgtcttccagttgctttatctgttcacttgtgccctgactttcaactctgtctccttcctcttcctacagtactcccctgccctcaacaagatgttttgccaactggccaagacctgccctgtgcagctgtgggttgattccacacccccgcccggcacccgcgtccgcgccatggccatctacaagcagtcacagcacatgacggaggttgtgaggcgctgcccccaccatgagcgctgctcagatagcgatggtgagcagctggggctggagagacgacagggctggttgcccagggtccccaggcctctg

SEQ ID NO: 699 - DNA, 1174 bp, Homo sapiens
acaatgaataagatagtagaaaaattctatatcctcataaggcttacgtttccatgtactgaaagcaatgaacaaataaatcttatcagagtgataagggttgtgaaggagattaaataagatggtgtgatataaagtatctgggagaaaacgttagggtgtgatattacggaaagccttcctaaaaaatgacattttaactgatgagaagaaaggatccagctgagagcaaacgcaaaagctttcttccttccacccttcatatttgacacaatgcaggattcctccaaaatgatttccaccaattctgccctcacagctctggcttgcagaattttccaccccaaaatgttagtatctacggcaccaggtcggcgagaatcctgactctgcaccctcctccccaactccatttcctttgcttcctccggcaggcggattacttgcccttacttgtcatggcgactgtccagctttgtgccaggagcctcgcaggggttgatgggattggggttttcccctcccatgtgctcaagactggcgctaaaagttttgagcttctcaaaagtctagagccaccgtccagggagcaggtagctgctgggctccggggacactttgcgttcgggctgggagcgtgctttccacgacggtgacacgcttccctggattgggtaagctcctgactgaacttgatgagtcctctctgagtcacgggctctcggctccgtgtattttcagctcgggaaaatcgctggggctgggggtggggcagtggggacttagcgagtttgggggtgagtgggatggaagcttggctagagggatcatcataggagttgcattgttgggagacctgggtgtagatgatggggatgttaggaccatccgaactcaaagttgaacgcctaggcagaggagtggagctttggggaaccttgagccggcctaaagcgtacttctttgcacatccacccggtgctgggcgtagggaatccctgaaataaaagatgcacaaagcattgaggtctgagacttttggatctcgaaacattgagaactcatagctgtatattttagagcccatggcatcctagtgaaaactggggctccattccgaaatgatcatttgggggtgatccggggagcccaagctgctaaggtcccacaactt

SEQ ID NO: 700 - DNA, 1102 bp, Homo sapiens
tctactaaaaatacaaaaattagctgggtgtggtggtactcgcctgtaatcccagctactcgggagactgaggcaggagaatggcttgaacccggaaggtagaggttgcagtgagctgagatcatgccactgtgctccagcctaggtgacagagagagactccatctcaaaaaaaaaaaaaaaatacaggaagggagttgggaatagggtgcacatttaggaagtcttggggatttagtggtgggaaggttggaagtccctctctgattgtcttttcctcaaagaagtgcatggctggtgaggggtggggcaggagtgcttgggttgtggtgaaacattggaagagagaatgtgaagcagccattcttttcctgctccacaggaagccgagctgtctcagacactggcatggtgttgggggagggggttccttctctgcaggcccaggtgacccagggttggaagtgtctcatgctggatccccacttttcctcttgcagcagccagactgccttccgggtcactgccatggaggagccgcagtcagatcctagcgtcgagccccctctgagtcaggaaacattttcagacctatggaaactgtgagtggatccattggaagggcaggcccaccacccccaccccaaccccagccccctagcagagacctgtgggaagcgaaaattccatgggactgactttctgctcttgtctttcagacttcctgaaaacaacgttctggtaaggacaagggttgggctggggacctggagggctggggacctggagggctggggggctggggggctgaggacctggtcctctgactgctcttttcacccatctacagtcccccttgccgtcccaagcaatggatgatttgatgctgtccccggacgatattgaacaatggttcactgaagacccaggtccagatgaagctcccagaatgccagaggctgctccccccgtggcccctgcaccagcagctcctacaccggcggcccctgcaccagccccctcctggcccctgtcatcttctgtcccttcccagaaaacctaccagggcagctacggtttccgtctgggcttcttgcattct

SEQ ID NO: 701 - DNA, 1241 bp, Homo sapiens
tctactaaaaatacaaaaattagctgggtgtggtggtactcgcctgtaatcccagctactcgggagactgaggcaggagaatggcttgaacccggaaggtagaggttgcagtgagctgagatcatgccactgtgctccagcctaggtgacagagagagactccatctcaaaaaaaaaaaaaaaatacaggaagggagttgggaatagggtgcacatttaggaagtcttggggatttagtggtgggaaggttggaagtccctctctgattgtcttttcctcaaagaagtgcatggctggtgaggggtggggcaggagtgcttgggttgtggtgaaacattggaagagagaatgtgaagcagccattcttttcctgctccacaggaagccgagctgtctcagacactggcatggtgttgggggagggggttccttctctgcaggcccaggtgacccagggttggaagtgtctcatgctggatccccacttttcctcttgcagcagccagactgccttccgggtcactgccatggaggagccgcagtcagatcctagcgtcgagccccctctgagtcaggaaacattttcagacctatggaaactgtgagtggatccattggaagggcaggcccaccacccccaccccaaccccagccccctagcagagacctgtgggaagcgaaaattccatgggactgactttctgctcttgtctttcagacttcctgaaaacaacgttctggtaaggacaagggttgggctggggacctggagggctggggacctggagggctggggggctggggggctgaggacctggtcctctgactgctcttttcacccatctacagtcccccttgccgtcccaagcaatggatgatttgatgctgtccccggacgatattgaacaatggttcactgaagacccaggtccagatgaagctcccagaatgccagaggctgctccccccgtggcccctgcaccagcagctcctacaccggcggcccctgcaccagccccctcctggcccctgtcatcttctgtcccttcccagaaaacctaccagggcagctacggtttccgtctgggcttcttgcattctgggacagccaagtctgtgacttgcacggtcagttgccctgaggggctggcttccatgagacttcaatgcctggccgtatccccctgcatttcttttgtttggaactttgggattcctcttcaccctttggcttcctgtc

SEQ ID NO: 702 - DNA, 1022 bp, Homo sapiens
ggaagtcttggggatttagtggtgggaaggttggaagtccctctctgattgtcttttcctcaaagaagtgcatggctggtgaggggtggggcaggagtgcttgggttgtggtgaaacattggaagagagaatgtgaagcagccattcttttcctgctccacaggaagccgagctgtctcagacactggcatggtgttgggggagggggttccttctctgcaggcccaggtgacccagggttggaagtgtctcatgctggatccccacttttcctcttgcagcagccagactgccttccgggtcactgccatggaggagccgcagtcagatcctagcgtcgagccccctctgagtcaggaaacattttcagacctatggaaactgtgagtggatccattggaagggcaggcccaccacccccaccccaaccccagccccctagcagagacctgtgggaagcgaaaattccatgggactgactttctgctcttgtctttcagacttcctgaaaacaacgttctggtaaggacaagggttgggctggggacctggagggctggggacctggagggctggggggctggggggctgaggacctggtcctctgactgctcttttcacccatctacagtcccccttgccgtcccaagcaatggatgatttgatgctgtccccggacgatattgaacaatggttcactgaagacccaggtccagatgaagctcccagaatgccagaggctgctccccccgtggcccctgcaccagcagctcctacaccggcggcccctgcaccagccccctcctggcccctgtcatcttctgtcccttcccagaaaacctaccagggcagctacggtttccgtctgggcttcttgcattctgggacagccaagtctgtgacttgcacggtcagttgccctgaggggctggcttccatgagacttcaatgcctggccgtatccccctgcatttcttttgtttggaactttgggattcctcttcaccctttggcttcctgtc

SEQ ID NO: 703 - DNA, 1279 bp, Homo sapiens
tgtgaagcagccattcttttcctgctccacaggaagccgagctgtctcagacactggcatggtgttgggggagggggttccttctctgcaggcccaggtgacccagggttggaagtgtctcatgctggatccccacttttcctcttgcagcagccagactgccttccgggtcactgccatggaggagccgcagtcagatcctagcgtcgagccccctctgagtcaggaaacattttcagacctatggaaactgtgagtggatccattggaagggcaggcccaccacccccaccccaaccccagccccctagcagagacctgtgggaagcgaaaattccatgggactgactttctgctcttgtctttcagacttcctgaaaacaacgttctggtaaggacaagggttgggctggggacctggagggctggggacctggagggctggggggctggggggctgaggacctggtcctctgactgctcttttcacccatctacagtcccccttgccgtcccaagcaatggatgatttgatgctgtccccggacgatattgaacaatggttcactgaagacccaggtccagatgaagctcccagaatgccagaggctgctccccccgtggcccctgcaccagcagctcctacaccggcggcccctgcaccagccccctcctggcccctgtcatcttctgtcccttcccagaaaacctaccagggcagctacggtttccgtctgggcttcttgcattctgggacagccaagtctgtgacttgcacggtcagttgccctgaggggctggcttccatgagacttcaatgcctggccgtatccccctgcatttcttttgtttggaactttgggattcctcttcaccctttggcttcctgtcagtgtttttttatagtttacccacttaatgtgtgatctctgactcctgtcccaaagttgaatattccccccttgaatttgggcttttatccatcccatcacaccctcagcatctctcctggggatgcagaacttttctttttcttcatccacgtgtattccttggcttttgaaaataagctcctgaccaggcttggtggctcacacctgcaatcccagcactctcaaagaggccaaggcaggcagatcacctgagcccaggagttcaagaccagcctgggtaacatgatgaaacctcgtctctacaaaaaaatacaaaaaattagccaggcatggtggtgcacacctatagtcccagccacttaggaggctgaggtgggaagatcact

SEQ ID NO: 704 - DNA, 1184 bp, Homo sapiens
catccacgtgtattccttggcttttgaaaataagctcctgaccaggcttggtggctcacacctgcaatcccagcactctcaaagaggccaaggcaggcagatcacctgagcccaggagttcaagaccagcctgggtaacatgatgaaacctcgtctctacaaaaaaatacaaaaaattagccaggcatggtggtgcacacctatagtcccagccacttaggaggctgaggtgggaagatcacttgaggccaggagatggaggctgcagtgagctgtgatcacaccactgtgctccagcctgagtgacagagcaagaccctatctcaaaaaaaaaaaaaaaaaagaaaagctcctgaggtgtagacgccaactctctctagctcgctagtgggttgcaggaggtgcttacgcatgtttgtttctttgctgccgtcttccagttgctttatctgttcacttgtgccctgactttcaactctgtctccttcctcttcctacagtactcccctgccctcaacaagatgttttgccaactggccaagacctgccctgtgcagctgtgggttgattccacacccccgcccggcacccgcgtccgcgccatggccatctacaagcagtcacagcacatgacggaggttgtgaggcgctgcccccaccatgagcgctgctcagatagcgatggtgagcagctggggctggagagacgacagggctggttgcccagggtccccaggcctctgattcctcactgattgctcttaggtctggcccctcctcagcatcttatccgagtggaaggaaatttgcgtgtggagtatttggatgacagaaacacttttcgacatagtgtggtggtgccctatgagccgcctgaggtctggtttgcaactggggtctctgggaggaggggttaagggtggttgtcagtggccctccaggtgagcagtaggggggctttctcctgctgcttatttgacctccctataaccccatgagatgtgcaaagtaaatgggtttaactattgcacagttgaaaaaactgaagcttacagaggctaagggcctcccctgcttggctgggcgcagtggctcatgcctgtaatcccagcactttgggaggccaaggcaggcggatcacgaggttgggagatcgagaccatcctggctaacggtgaaacccc

SEQ ID NO: 705 - DNA, 1113 bp, Homo sapiens
cagtgagctgtgatcacaccactgtgctccagcctgagtgacagagcaagaccctatctcaaaaaaaaaaaaaaaaaagaaaagctcctgaggtgtagacgccaactctctctagctcgctagtgggttgcaggaggtgcttacgcatgtttgtttctttgctgccgtcttccagttgctttatctgttcacttgtgccctgactttcaactctgtctccttcctcttcctacagtactcccctgccctcaacaagatgttttgccaactggccaagacctgccctgtgcagctgtgggttgattccacacccccgcccggcacccgcgtccgcgccatggccatctacaagcagtcacagcacatgacggaggttgtgaggcgctgcccccaccatgagcgctgctcagatagcgatggtgagcagctggggctggagagacgacagggctggttgcccagggtccccaggcctctgattcctcactgattgctcttaggtctggcccctcctcagcatcttatccgagtggaaggaaatttgcgtgtggagtatttggatgacagaaacacttttcgacatagtgtggtggtgccctatgagccgcctgaggtctggtttgcaactggggtctctgggaggaggggttaagggtggttgtcagtggccctccaggtgagcagtaggggggctttctcctgctgcttatttgacctccctataaccccatgagatgtgcaaagtaaatgggtttaactattgcacagttgaaaaaactgaagcttacagaggctaagggcctcccctgcttggctgggcgcagtggctcatgcctgtaatcccagcactttgggaggccaaggcaggcggatcacgaggttgggagatcgagaccatcctggctaacggtgaaaccccgtctctactgaaaaatacaaaaaaaaattagccgggcgtggtgctgggcacctgtagtcccagctactcgggaggctgaggaaggagaatggcgtgaacctgggcggtggagcttgcagtgagctgagatcacgccactgcactccagcctgggcgacagagcgagattccatctcaaaaaaaaaaaaaaaagg

SEQ ID NO: 706 - DNA, 1441 bp, Homo sapiens
gtcagttgccctgaggggctggcttccatgagacttcaatgcctggccgtatccccctgcatttcttttgtttggaactttgggattcctcttcaccctttggcttcctgtcagtgtttttttatagtttacccacttaatgtgtgatctctgactcctgtcccaaagttgaatattccccccttgaatttgggcttttatccatcccatcacaccctcagcatctctcctggggatgcagaacttttctttttcttcatccacgtgtattccttggcttttgaaaataagctcctgaccaggcttggtggctcacacctgcaatcccagcactctcaaagaggccaaggcaggcagatcacctgagcccaggagttcaagaccagcctgggtaacatgatgaaacctcgtctctacaaaaaaatacaaaaaattagccaggcatggtggtgcacacctatagtcccagccacttaggaggctgaggtgggaagatcacttgaggccaggagatggaggctgcagtgagctgtgatcacaccactgtgctccagcctgagtgacagagcaagaccctatctcaaaaaaaaaaaaaaaaaagaaaagctcctgaggtgtagacgccaactctctctagctcgctagtgggttgcaggaggtgcttacgcatgtttgtttctttgctgccgtcttccagttgctttatctgttcacttgtgccctgactttcaactctgtctccttcctcttcctacagtactcccctgccctcaacaagatgttttgccaactggccaagacctgccctgtgcagctgtgggttgattccacacccccgcccggcacccgcgtccgcgccatggccatctacaagcagtcacagcacatgacggaggttgtgaggcgctgcccccaccatgagcgctgctcagatagcgatggtgagcagctggggctggagagacgacagggctggttgcccagggtccccaggcctctgattcctcactgattgctcttaggtctggcccctcctcagcatcttatccgagtggaaggaaatttgcgtgtggagtatttggatgacagaaacacttttcgacatagtgtggtggtgccctatgagccgcctgaggtctggtttgcaactggggtctctgggaggaggggttaagggtggttgtcagtggccctccaggtgagcagtaggggggctttctcctgctgcttatttgacctccctataaccccatgagatgtgcaaagtaaatgggtttaactattgcacagttgaaaaaactgaagcttacagaggctaagggcctcccctgcttggctgggcgcagtggctcatgcctgtaatcccagcactttgggaggccaaggcaggcggatcacgaggttgggagatcgagaccatcctggctaacggtgaaacccc

SEQ ID NO: 707 - DNA, 1110 bp, Homo sapiens
cagtaggggggctttctcctgctgcttatttgacctccctataaccccatgagatgtgcaaagtaaatgggtttaactattgcacagttgaaaaaactgaagcttacagaggctaagggcctcccctgcttggctgggcgcagtggctcatgcctgtaatcccagcactttgggaggccaaggcaggcggatcacgaggttgggagatcgagaccatcctggctaacggtgaaaccccgtctctactgaaaaatacaaaaaaaaattagccgggcgtggtgctgggcacctgtagtcccagctactcgggaggctgaggaaggagaatggcgtgaacctgggcggtggagcttgcagtgagctgagatcacgccactgcactccagcctgggcgacagagcgagattccatctcaaaaaaaaaaaaaaaaggcctcccctgcttgccacaggtctccccaaggcgcactggcctcatcttgggcctgtgttatctcctaggttggctctgactgtaccaccatccactacaactacatgtgtaacagttcctgcatgggcggcatgaaccggaggcccatcctcaccatcatcacactggaagactccaggtcaggagccacttgccaccctgcacactggcctgctgtgccccagcctctgcttgcctctgacccctgggcccacctcttaccgatttcttccatactactacccatccacctctcatcacatccccggcggggaatctccttactgctcccactcagttttcttttctctggctttgggacctcttaacctgtggcttctcctccacctacctggagctggagcttaggctccagaaaggacaagggtggttgggagtagatggagcctggttttttaaatgggacaggtaggacctgatttccttactgcctcttgcttctcttttcctatcctgagtagtggtaatctactgggacggaacagctttgaggtgcgtgtttgtgcctgtcctgggagagaccggcgcacagaggaagagaatctccgcaagaaaggggagcctcaccacgagctgcccccagggagcactaagcgaggtaagcaagcaggacaagaa

SEQ ID NO: 708 - DNA, 1137 bp, Homo sapiens
ctccccaaggcgcactggcctcatcttgggcctgtgttatctcctaggttggctctgactgtaccaccatccactacaactacatgtgtaacagttcctgcatgggcggcatgaaccggaggcccatcctcaccatcatcacactggaagactccaggtcaggagccacttgccaccctgcacactggcctgctgtgccccagcctctgcttgcctctgacccctgggcccacctcttaccgatttcttccatactactacccatccacctctcatcacatccccggcggggaatctccttactgctcccactcagttttcttttctctggctttgggacctcttaacctgtggcttctcctccacctacctggagctggagcttaggctccagaaaggacaagggtggttgggagtagatggagcctggttttttaaatgggacaggtaggacctgatttccttactgcctcttgcttctcttttcctatcctgagtagtggtaatctactgggacggaacagctttgaggtgcgtgtttgtgcctgtcctgggagagaccggcgcacagaggaagagaatctccgcaagaaaggggagcctcaccacgagctgcccccagggagcactaagcgaggtaagcaagcaggacaagaagcggtggaggagaccaagggtgcagttatgcctcagattcacttttatcacctttccttgcctctttcctagcactgcccaacaacaccagctcctctccccagccaaagaagaaaccactggatggagaatatttcacccttcaggtactaagtcttgggacctcttatcaagtggaaagtttccagtctaacactcaaaatgccgttttcttcttgactgttttacctgcaattggggcatttgccatcagggggcagtgatgcctcaaagacaatggctcctggttgtagctaactaacttcagaacaccaacttataccataatatatattttaaaggaccagaccagctttcaaaaagaaaattgttaaagagagcatgaaaatggttctatgactttgcctgatacagatgctacttgacttacgatggtgttacttcctgataaactcgtcgtaagttgaaaatattgtaagt

SEQ ID NO: 709 - DNA, 1074 bp, Homo sapiens
ccacctcttaccgatttcttccatactactacccatccacctctcatcacatccccggcggggaatctccttactgctcccactcagttttcttttctctggctttgggacctcttaacctgtggcttctcctccacctacctggagctggagcttaggctccagaaaggacaagggtggttgggagtagatggagcctggttttttaaatgggacaggtaggacctgatttccttactgcctcttgcttctcttttcctatcctgagtagtggtaatctactgggacggaacagctttgaggtgcgtgtttgtgcctgtcctgggagagaccggcgcacagaggaagagaatctccgcaagaaaggggagcctcaccacgagctgcccccagggagcactaagcgaggtaagcaagcaggacaagaagcggtggaggagaccaagggtgcagttatgcctcagattcacttttatcacctttccttgcctctttcctagcactgcccaacaacaccagctcctctccccagccaaagaagaaaccactggatggagaatatttcacccttcaggtactaagtcttgggacctcttatcaagtggaaagtttccagtctaacactcaaaatgccgttttcttcttgactgttttacctgcaattggggcatttgccatcagggggcagtgatgcctcaaagacaatggctcctggttgtagctaactaacttcagaacaccaacttataccataatatatattttaaaggaccagaccagctttcaaaaagaaaattgttaaagagagcatgaaaatggttctatgactttgcctgatacagatgctacttgacttacgatggtgttacttcctgataaactcgtcgtaagttgaaaatattgtaagttgaaaatggatttaatacacctaatctaaggaacatcatagcttagcctagcctgctttttttttttttttttttggagacagagtctcactctgtcacccaggctggagtgcagtggcgggatctcggctcactgcaacctccgccttctgggttcaagcgattc

SEQ ID NO: 710 - DNA, 1107 bp, Homo sapiens
gcctgaacaacatagcaagacatcatctctaaaatttaaaaaagggccgggcacagtggctcacacctgtaatcccagcactttgggaggtggaggtgggtagatcacctgacgtcaggagttggaaaccagcctggctaacatggtgaagccccatctctactaaaaacacaaaaattagccaggtgtggtagcacacgcctgtagtcccagctactcgggaggctgaggcacaagaatcacttgaaccccagaggcggagattgcaatcagccaagattgcaccattgcactcccgcctgggcaacagagtgagaccccatctcaaaataaataaataaatatttttaaaagtcagctgtataggtacttgaagtgcagtttctactaaatgcatgttgcttttgtaccgtcataaagtcaaacaattgtaacttgaaccatcttttaactcaggtactgtgtatatacttacttctccccctcctctgttgctgcagatccgtgggcgtgagcgcttcgagatgttccgagagctgaatgaggccttggaactcaaggatgcccaggctgggaaggagccaggggggagcagggctcactccaggtgagtgacctcagccccttcctggccctactcccctgccttcctaggttggaaagccataggattccattctcatcctgccttcatggtcaaaggcagctgaccccatctcattgggtcccagccctgcacagacatttttttagtcttcctccggttgaatcctataaccacattcttgcctcagtgtatccacagaacatccaaacccagggacgagtgtggatacttctttgccattctccgcaactcccagcccagagctggagggtctcaaggaggggcctaataattgtgtaatactgaatacagccagagtttcaggtcatatactcagccctgccatgcaccggcaggtcctaggtgacccccgtcaaactcagtttccttatatataaaatggggtaagggggccgggcgcagtggctcacgaatcccacactctgggaggccaaggcgagtggatcacctgaggtcgggagtttgagcccagcctgacc

SEQ ID NO: 711 - DNA, 1060 bp, Homo sapiens
aggaagagaatctccgcaagaaaggggagcctcaccacgagctgcccccagggagcactaagcgaggtaagcaagcaggacaagaagcggtggaggagaccaagggtgcagttatgcctcagattcacttttatcacctttccttgcctctttcctagcactgcccaacaacaccagctcctctccccagccaaagaagaaaccactggatggagaatatttcacccttcaggtactaagtcttgggacctcttatcaagtggaaagtttccagtctaacactcaaaatgccgttttcttcttgactgttttacctgcaattggggcatttgccatcagggggcagtgatgcctcaaagacaatggctcctggttgtagctaactaacttcagaacaccaacttataccataatatatattttaaaggaccagaccagctttcaaaaagaaaattgttaaagagagcatgaaaatggttctatgactttgcctgatacagatgctacttgacttacgatggtgttacttcctgataaactcgtcgtaagttgaaaatattgtaagttgaaaatggatttaatacacctaatctaaggaacatcatagcttagcctagcctgctttttttttttttttttttggagacagagtctcactctgtcacccaggctggagtgcagtggcgggatctcggctcactgcaacctccgccttctgggttcaagcgattctcctgcctcagcccactgagtagctgggattacaggcacctgccccgacgcccagctaattttttgttatttatttatttttttttttagtagagatgaggtttcaccatgttggccaggctagtctcgaactcctgaccttgtgatctgcctgccttggcctcccaaagtgctgggattacaggcgtgagccaccgcacccggcctgcctagcctacttttattttatttttaatggagacagcatcttgctctgttgcccaggctggattacagtgatgtgatcatagctcattataccctcctgggctcaagcaatccccctaac

SEQ ID NO: 712 - DNA, 1133 bp, Homo sapiens
agtggtaatctactgggacggaacagctttgaggtgcgtgtttgtgcctgtcctgggagagaccggcgcacagaggaagagaatctccgcaagaaaggggagcctcaccacgagctgcccccagggagcactaagcgaggtaagcaagcaggacaagaagcggtggaggagaccaagggtgcagttatgcctcagattcacttttatcacctttccttgcctctttcctagcactgcccaacaacaccagctcctctccccagccaaagaagaaaccactggatggagaatatttcacccttcaggtactaagtcttgggacctcttatcaagtggaaagtttccagtctaacactcaaaatgccgttttcttcttgactgttttacctgcaattggggcatttgccatcagggggcagtgatgcctcaaagacaatggctcctggttgtagctaactaacttcagaacaccaacttataccataatatatattttaaaggaccagaccagctttcaaaaagaaaattgttaaagagagcatgaaaatggttctatgactttgcctgatacagatgctacttgacttacgatggtgttacttcctgataaactcgtcgtaagttgaaaatattgtaagttgaaaatggatttaatacacctaatctaaggaacatcatagcttagcctagcctgctttttttttttttttttttggagacagagtctcactctgtcacccaggctggagtgcagtggcgggatctcggctcactgcaacctccgccttctgggttcaagcgattctcctgcctcagcccactgagtagctgggattacaggcacctgccccgacgcccagctaattttttgttatttatttatttttttttttagtagagatgaggtttcaccatgttggccaggctagtctcgaactcctgaccttgtgatctgcctgccttggcctcccaaagtgctgggattacaggcgtgagccaccgcacccggcctgcctagcctacttttattttatttttaatggagacagcatcttgctctgttgcccaggctggattacagtgatgtgatcatagctcattataccctcctgggctcaagcaatccccctaac

SEQ ID NO: 713 - DNA, 2289 bp, Homo sapiens
cgcagtggctcacgaatcccacactctgggaggccaaggcgagtggatcacctgaggtcgggagtttgagcccagcctgaccaacatggagaaaccccatctctactaaaaatacaaaagtagccgggcgtggtgatgcatgcctgtaatcccagctacctactcgggaggctgaggcaggagaatcgcttgaacccgggaggcagaggttgcggtgagctgagatctcaccattacactccagcctgggcaacaagagtgaaactccgtctcaaaaaagataaataaagtaaaatggggtaagggaagattacgagactaatacacactaatactctgaggtgctcagtaaacatatttgcatggggtgtggccaccatcttgatttgaattcccgttgtcccagccttaggcccttcaaagcattggtcagggaaaaggggcacagaccctctcactcatgtgatgtcatctctcctccctgcttctgtctcctacagccacctgaagtccaaaaagggtcagtctacctcccgccataaaaaactcatgttcaagacagaagggcctgactcagactgacattctccacttcttgttccccactgacagcctcccacccccatctctccctcccctgccattttgggttttgggtctttgaacccttgcttgcaataggtgtgcgtcagaagcacccaggacttccatttgctttgtcccggggctccactgaacaagttggcctgcactggtgttttgttgtggggaggaggatggggagtaggacataccagcttagattttaaggtttttactgtgagggatgtttgggagatgtaagaaatgttcttgcagttaagggttagtttacaatcagccacattctaggtaggggcccacttcaccgtactaaccagggaagctgtccctcactgttgaattttctctaacttcaaggcccatatctgtgaaatgctggcatttgcacctacctcacagagtgcattgtgagggttaatgaaataatgtacatctggccttgaaaccaccttttattacatggggtctagaacttgacccccttgagggtgcttgttccctctccctgttggtcggtgggttggtagtttctacagttgggcagctggttaggtagagggagttgtcaagtctctgctggcccagccaaaccctgtctgacaacctcttggtgaaccttagtacctaaaaggaaatctcaccccatcccacaccctggaggatttcatctcttgtatatgatgatctggatccaccaagacttgttttatgctcagggtcaatttcttttttcttttttttttttttttttctttttctttgagactgggtctcgctttgttgcccaggctggagtggagtggcgtgatcttggcttactgcagcctttgcctccccggctcgagcagtcctgcctcagcctccggagtagctgggaccacaggttcatgccaccatggccagccaacttttgcatgttttgtagagatggggtctcacagtgttgcccaggctggtctcaaactcctgggctcaggcgatccacctgtctcagcctcccagagtgctgggattacaattgtgagccaccacgtccagctggaagggtcaacatcttttacattctgcaagcacatctgcattttcaccccacccttcccctccttctccctttttatatcccatttttatatcgatctcttattttacaataaaactttgctgccacctgtgtgtctgaggggtgaacgccagtgcaggctactggggtcagcaggtgcaggggtgagtgaggaggtgctgggaagcagccacctgagtctgcaatgagtgtgggctggggggcccagtgcccgggttccgggaggggaacaaaggctggagactgggtcagtctgcgggctgcatgacaacaagggagggggtggctccattcataactcaggaaccaaccgtccctcctcccctccggccacggctggcacaaggttctctccctcccctgcttctaggactgggctgcttccccctcggcagcctctcaccaaggattacgggatttaaatgtctgatttagcaaggctgagcctccagggtggccatctgctccatcagaaagtggcaggatacctgggttcccaaggggaacaggggtgggtgctactggatggagagaggccagtgggaggcctgctagccagggtcccaggaaagtgggggcagctaaggtaagagtaggggtgtggg

SEQ ID NO: 714 - DNA, 1500 bp, Homo sapiens
tggatccaccaagacttgttttatgctcagggtcaatttcttttttcttttttttttttttttttctttttctttgagactgggtctcgctttgttgcccaggctggagtggagtggcgtgatcttggcttactgcagcctttgcctccccggctcgagcagtcctgcctcagcctccggagtagctgggaccacaggttcatgccaccatggccagccaacttttgcatgttttgtagagatggggtctcacagtgttgcccaggctggtctcaaactcctgggctcaggcgatccacctgtctcagcctcccagagtgctgggattacaattgtgagccaccacgtccagctggaagggtcaacatcttttacattctgcaagcacatctgcattttcaccccacccttcccctccttctccctttttatatcccatttttatatcgatctcttattttacaataaaactttgctgccacctgtgtgtctgaggggtgaacgccagtgcaggctactggggtcagcaggtgcaggggtgagtgaggaggtgctgggaagcagccacctgagtctgcaatgagtgtgggctggggggcccagtgcccgggttccgggaggggaacaaaggctggagactgggtcagtctgcgggctgcatgacaacaagggagggggtggctccattcataactcaggaaccaaccgtccctcctcccctccggccacggctggcacaaggttctctccctcccctgcttctaggactgggctgcttccccctcggcagcctctcaccaaggattacgggatttaaatgtctgatttagcaaggctgagcctccagggtggccatctgctccatcagaaagtggcaggatacctgggttcccaaggggaacaggggtgggtgctactggatggagagaggccagtgggaggcctgctagccagggtcccaggaaagtgggggcagctaaggtaagagtaggggtgtggggctaggtccttcccagcatcccctcatcctgggcctcatgccaggtagctgaatgaattgaagctttaaactctgccaggaaaacctttcaaagggcttcttgggatagggaggagagtcgggttgaggagctcagtactgcctgcccatgctcctcagggctgctggctcccagggaggggggctgggagcaggcaggctcttccccatcacccactgctctcttggagccagtgcttgaaggggcagtcagacatggcttgcccttcctcctccctggtggtggagatgggtgttagggtccagtgggtgctactgtccaggggggcttctggggccaccagcctgtcagctcatcaaccaggctgaaggtgcaagcaggagccccttgccttgccccaaggatcccagacagctatgaagccaccagccttcctgacctcaagaccaccttttttttttctctttcttactagggaatgccaaacactctccccagg

SEQ ID NO: 715 - DNA, 4560 bp, Homo sapiens
cctcgcctccgttacaacggcctacggtgctggaggatccttctgcgcacgcgcacagcctccggccggctatttccgcgagcgcgttccatcctctaccgagcgcgcgcgaagactacggaggtcgactcgggagcgcgcacgcagctccgccccgcgtccgacccgcggatcccgcggcgtccggcccgggtggtctggatcgcggagggaatgccccggagggcggagaactgggacgaggccgaggtaggcgcggaggaggcaggcgtcgaagagtacggccctgaagaagacggcggggaggagtcgggcgccgaggagtccggcccggaagagtccggcccggaggaactgggcgccgaggaggagatggaggccgggcggccgcggcccgtgctgcgctcggtgaactcgcgcgagccctcccaggtcatcttctgcaatcgcagtccgcgcgtcgtgctgcccgtatggctcaacttcgacggcgagccgcagccctacccaacgctgccgcctggcacgggccgccgcatccacagctaccgaggtcacctttggctcttcagagatgcagggacacacgatgggcttctggttaaccaaactgaattatttgtgccatctctcaatgttgacggacagcctatttttgccaatatcacactgccagtgtatactctgaaagagcgatgcctccaggttgtccggagcctagtcaagcctgagaattacaggagactggacatcgtcaggtcgctctacgaagatctggaagaccacccaaatgtgcagaaagacctggagcggctgacacaggagcgcattgcacatcaacggatgggagattgaagatttctgttgaaacttacactgtttcatctcagcttttgatggtactgatgagtcttgatctagatacaggactggttccttccttagtttcaaagtgtctcattctcagagtaaaataggcaccattgcttaaaagaaagttaactgacttcactaggcattgtgatgtttaggggcaaacatcacaaaatgtaatttaatgcctgcccattagagaagtatttatcaggagaaggtggtggcatttttgcttcctagtaagtcaggacagcttgtatgtaaggaggtttgtataagtaattcagtgggaattgcagcatatcgtttaattttaagaaggcattggcatctgcttttaatggatgtataatacatccattctacatccgtagcggttggtgacttgtctgcctcctgctttgggaagactgaggcatccgtgaggcagggacaagtctttctcctctttgagaccccagtgcctgcacatcatgagccttcagtcagggtttgtcagaggaacaaaccaggggacactttgttagaaagtgcttagaggttctgcctctatttttgttggggggtgggagaggggaccttaaaatgtgtacagtgaacaaatgtcttaaagggaatcatttttgtaggaagcattttttataattttctaagtcgtgcactttctcggtccactcttgttgaagtgctgttttattactgtttctaaactaggattgacattctacagttgtgataatagcatttttgtaacttgccatccgcacagaaaatacgagaaaatctgcatgtttgattatagtattaatggacaaataagtttttgctaaatgtgagtatttctgttcctttttgtaaatatgtgacattcctgattgatttgggtttttttgttgttgttgttttgttttgttttgtttttttgagatggagtctcactcttgtcacccaggctggagtgcagtggcgccatctcggctcactgcaacctctgcctcctgggttcacgtaatcctcctgagtagctgggattacaggcgcctgccaccacgctggccaatttttgtacttttagtagagacagtgtttcgccatgttggccaggctggtttcaaactcctgacctcaggtgatccgcccacctcagcctcccaaaatggtgggattacaggtgtgtgggccaccgtgcctggctgattcagcattttttatcaggcaggaccaggtggcacttccacctccagcctctggtcctaccaatggattcatggagtagcctggactgtttcatagttttctaaatgtacaaattcttataggctagacttagattcattaactcaaattcaatgcttctatcagactcagttttttgtaactaatagatttttttttccacttttgttctactccttccctaatagctttttaaaaaaatctccccagtagagaaacatttggaaaagacagaaaactaaaaaggaagaaaaaagatccctattagatacacttcttaaatacaatcacattaacattttgagctatttccttccagcctttttagggcagattttggttggtttttacatagttgagattgtactgttcatacagttttataccctttttcatttaactttataacttaaatattgctctatgttagtataagcttttcacaaacattagtatagtctcccttttataattaatgtttgtgggtatttcttggcatgcatctttaattccttatcctagcctttgggcacaattcctgtgctcaaaaatgagagtgacggctggcatggtggctcccgcctgtaatcccagtactttggaaagccaaggtaagaggattgcttgagcccagaacttcaagatgagcctgggctcatagtgagaacccatctatacaaaaaatttttaaaaattagcatggcggcacacatctgtaatcctagctacttggcaggctgaggtgagaagatcattggagtttaggaattggaggctgcagtgagccatgagtatgccactgcactccagcctgggggacagagcaagaccctgcctcaaaaaaaaaaaaaaaaaaaaaatcaggccgggcatggtggctcacgcctgtaatcccagcactttgggaggtcgaggtgggcagatcacctgaggtcaggagttcgagaccagcctggccaacatggtaaaaccccatttctactaaaaaatacaagaattagctgggtgtggtggcgcatgcctgtaatcctagctactcaggaggctgaggcaggagaatcacttgaacccaggaggcgaagattgcagtgagctgatatcgcaccattgtactccagcctgtgtgacagagcaatactcttgtctcaaaaaaaaaaaaaaattcaaatcagagtgaagtgaatgagacactccagttttccttctactccgaatttcaactgattttagctcctcctttcaacattcaacaaatagtctttttttttttttttttttttttttttttgagatggagtctcactctgttgcccaggctggagtgcagtggtgcgatctctgctcactacaagctctgcctcccgagttcaagtgattctcctggctcaccctcctgagtagctgggattacaggcgcctgccaccatgcctggctaattttgtgtttttagtggagacggggtttcaccatgttgtccaggatggtcttgatctcctgaccttgtgatccacccacctcagcctcccaaagtgctgggattacaggtgtgagccaccgcgtccagccagctttattattttttttaagctgtctttgtgtcaaaatgatagttcatgctcctcttgttaaaacctgcaggccgagcacagtggctcatgcctgtaatcccagcattttgggagaccaaggcggatggatcacctgaggtcaggagctgaagaccagcctggctaacatggtgaaacctcatctccacttaaaatacaaaaattgccggccgcggcggctcatgcctgtaatcccagcactttgggaggcctaggcgggtggatcacgaggtcaggaaatcgagaccatcctggctaacacgggtgaaaccccgtctctattaaaaaatagaaaaaattaggcgggcgtggtggtgagcgcctgtagtcccagctactcgagagcctgaggcaggagaatggcatgaacctggaaggcggagcttgcagtgagctgagatggtgccactgcactctaacctgggcgacagagtgagacaccgtctcaaaaaaaaaaacaaaaaacaaaaattatccaggtgtggcggtgggcgcctgtgaggcaggcgaatctcttgaacccgggaggcggaggttgcagtgagccaagatcacaccattgcactccagcctgggcaacaagagtgaaattccatctcaaaaagaaaccaaaaaaacaaaaaaaaaacatgccgtttgagtactgtgtttttggtgttgtccaaggaaaattaaaaacctgtagcatgaataatgtttgtttttcatttcgaatcttgtgaatgtattaaatatatcgctcttaagagacggtgaagttcctatttcaagtttttttttttttttttttttttaaagctgttttttaatacattaaatggtgctgagtaaaggaaatag

SEQ ID NO: 716 - DNA, 4437 bp, Homo sapiens
cctcgcctccgttacaacggcctacggtgctggaggatccttctgcgcacgcgcacagcctccggccggctatttccgcgagcgcgttccatcctctaccgagcgcgcgcgaagactacggaggtcgactcgggagcgcgcacgcagctccgccccgcgtccgacccgcggatcccgcggcgtccggcccgggtggtctggatcgcggagggaatgccccggagggcggagaactgggacgaggccgaggtaggcgcggaggaggcaggcgtcgaagagtacggccctgaagaagacggcggggaggagtcgggcgccgaggagtccggcccggaagagtccggcccggaggaactgggcgccgaggaggagatggaggccgggcggccgcggcccgtgctgcgctcggtgaactcgcgcgagccctcccaggtcatcttctgcaatcgcagtccgcgcgtcgtgctgcccgtatggctcaacttcgacggcgagccgcagccctacccaacgctgccgcctggcacgggccgccgcatccacagctaccgagtgtatactctgaaagagcgatgcctccaggttgtccggagcctagtcaagcctgagaattacaggagactggacatcgtcaggtcgctctacgaagatctggaagaccacccaaatgtgcagaaagacctggagcggctgacacaggagcgcattgcacatcaacggatgggagattgaagatttctgttgaaacttacactgtttcatctcagcttttgatggtactgatgagtcttgatctagatacaggactggttccttccttagtttcaaagtgtctcattctcagagtaaaataggcaccattgcttaaaagaaagttaactgacttcactaggcattgtgatgtttaggggcaaacatcacaaaatgtaatttaatgcctgcccattagagaagtatttatcaggagaaggtggtggcatttttgcttcctagtaagtcaggacagcttgtatgtaaggaggtttgtataagtaattcagtgggaattgcagcatatcgtttaattttaagaaggcattggcatctgcttttaatggatgtataatacatccattctacatccgtagcggttggtgacttgtctgcctcctgctttgggaagactgaggcatccgtgaggcagggacaagtctttctcctctttgagaccccagtgcctgcacatcatgagccttcagtcagggtttgtcagaggaacaaaccaggggacactttgttagaaagtgcttagaggttctgcctctatttttgttggggggtgggagaggggaccttaaaatgtgtacagtgaacaaatgtcttaaagggaatcatttttgtaggaagcattttttataattttctaagtcgtgcactttctcggtccactcttgttgaagtgctgttttattactgtttctaaactaggattgacattctacagttgtgataatagcatttttgtaacttgccatccgcacagaaaatacgagaaaatctgcatgtttgattatagtattaatggacaaataagtttttgctaaatgtgagtatttctgttcctttttgtaaatatgtgacattcctgattgatttgggtttttttgttgttgttgttttgttttgttttgtttttttgagatggagtctcactcttgtcacccaggctggagtgcagtggcgccatctcggctcactgcaacctctgcctcctgggttcacgtaatcctcctgagtagctgggattacaggcgcctgccaccacgctggccaatttttgtacttttagtagagacagtgtttcgccatgttggccaggctggtttcaaactcctgacctcaggtgatccgcccacctcagcctcccaaaatggtgggattacaggtgtgtgggccaccgtgcctggctgattcagcattttttatcaggcaggaccaggtggcacttccacctccagcctctggtcctaccaatggattcatggagtagcctggactgtttcatagttttctaaatgtacaaattcttataggctagacttagattcattaactcaaattcaatgcttctatcagactcagttttttgtaactaatagatttttttttccacttttgttctactccttccctaatagctttttaaaaaaatctccccagtagagaaacatttggaaaagacagaaaactaaaaaggaagaaaaaagatccctattagatacacttcttaaatacaatcacattaacattttgagctatttccttccagcctttttagggcagattttggttggtttttacatagttgagattgtactgttcatacagttttataccctttttcatttaactttataacttaaatattgctctatgttagtataagcttttcacaaacattagtatagtctcccttttataattaatgtttgtgggtatttcttggcatgcatctttaattccttatcctagcctttgggcacaattcctgtgctcaaaaatgagagtgacggctggcatggtggctcccgcctgtaatcccagtactttggaaagccaaggtaagaggattgcttgagcccagaacttcaagatgagcctgggctcatagtgagaacccatctatacaaaaaatttttaaaaattagcatggcggcacacatctgtaatcctagctacttggcaggctgaggtgagaagatcattggagtttaggaattggaggctgcagtgagccatgagtatgccactgcactccagcctgggggacagagcaagaccctgcctcaaaaaaaaaaaaaaaaaaaaaatcaggccgggcatggtggctcacgcctgtaatcccagcactttgggaggtcgaggtgggcagatcacctgaggtcaggagttcgagaccagcctggccaacatggtaaaaccccatttctactaaaaaatacaagaattagctgggtgtggtggcgcatgcctgtaatcctagctactcaggaggctgaggcaggagaatcacttgaacccaggaggcgaagattgcagtgagctgatatcgcaccattgtactccagcctgtgtgacagagcaatactcttgtctcaaaaaaaaaaaaaaattcaaatcagagtgaagtgaatgagacactccagttttccttctactccgaatttcaactgattttagctcctcctttcaacattcaacaaatagtctttttttttttttttttttttttttttttgagatggagtctcactctgttgcccaggctggagtgcagtggtgcgatctctgctcactacaagctctgcctcccgagttcaagtgattctcctggctcaccctcctgagtagctgggattacaggcgcctgccaccatgcctggctaattttgtgtttttagtggagacggggtttcaccatgttgtccaggatggtcttgatctcctgaccttgtgatccacccacctcagcctcccaaagtgctgggattacaggtgtgagccaccgcgtccagccagctttattattttttttaagctgtctttgtgtcaaaatgatagttcatgctcctcttgttaaaacctgcaggccgagcacagtggctcatgcctgtaatcccagcattttgggagaccaaggcggatggatcacctgaggtcaggagctgaagaccagcctggctaacatggtgaaacctcatctccacttaaaatacaaaaattgccggccgcggcggctcatgcctgtaatcccagcactttgggaggcctaggcgggtggatcacgaggtcaggaaatcgagaccatcctggctaacacgggtgaaaccccgtctctattaaaaaatagaaaaaattaggcgggcgtggtggtgagcgcctgtagtcccagctactcgagagcctgaggcaggagaatggcatgaacctggaaggcggagcttgcagtgagctgagatggtgccactgcactctaacctgggcgacagagtgagacaccgtctcaaaaaaaaaaacaaaaaacaaaaattatccaggtgtggcggtgggcgcctgtgaggcaggcgaatctcttgaacccgggaggcggaggttgcagtgagccaagatcacaccattgcactccagcctgggcaacaagagtgaaattccatctcaaaaagaaaccaaaaaaacaaaaaaaaaacatgccgtttgagtactgtgtttttggtgttgtccaaggaaaattaaaaacctgtagcatgaataatgtttgtttttcatttcgaatcttgtgaatgtattaaatatatcgctcttaagagacggtgaagttcctatttcaagtttttttttttttttttttttttaaagctgttttttaatacattaaatggtgctgagtaaaggaaatag

1. (canceled)

2. A method for determining whether a patient has an increased risk of cancer, which comprises: (1) determining for a plurality of genes consisting of between W and X genes, said plurality of genes comprising at least two genes in any of Panels A-R, whether the patient has a germline deficiency in any genes in said plurality of genes; and either (2) correlating a germline deficiency in any of said plurality of genes to an increased risk of cancer, or (3) correlating the absence of a germline deficiency in all of said plurality of genes to no increased risk of cancer.

3. The method of claim 2 further comprising (a) isolating a plurality of nucleic acid molecules from a sample taken from a patient, each nucleic acid molecule comprising between A and B nucleotides in length, and said plurality of nucleic acid molecules comprising one or more exons of said plurality of genes and (b) determining the sequence of said plurality of nucleic acid molecules.

4. The method of claim 3, further comprising detecting a germline deficiency in a gene by comparing the sequence determined in (b) with one or more reference sequences.

5. A method treating a patient comprising (1) determining for a plurality of genes consisting of between W and X genes, said plurality of genes comprising at least two genes in any of Panels A-R, whether the patient has a germline deficiency in any genes in said plurality of genes; and (2)(a) correlating a germline deficiency in any of said plurality of genes to an increased risk of cancer, or (2)(b) correlating the absence of a germline deficiency in all of said plurality of genes to no increased risk of cancer; and (3) recommending, prescribing, or administering a treatment to reduce the patient's risk of cancer.

6-9. (canceled)

10. A system comprising (1) computer program for receiving, storing, and/or retrieving a patient's sequence data for a plurality of genes consisting of between W and X genes, said plurality of genes comprising at least two genes in any of Panels A-R; (2) computer program for querying this patient data; (3) optionally a computer program for comparing the patient's sequence data to one or more reference sequences to determine whether there is a mutation; (4) computer program for concluding whether there is an increased likelihood of cancer based on the presence or absence of a mutation; and optionally (4) computer program for outputting/displaying this conclusion.

11-13. (canceled)

14. A composition comprising:
(a) nucleic acid probes hybridizing to a plurality of nucleic acid molecules comprising one or more exons of a plurality of genes consisting of between W and X genes, and said plurality of genes comprising at least two genes in any of Panels A-R;
(b) nucleic acid primers and primer pairs suitable for selectively amplifying nucleic acids of (a);
(c) antibodies binding immunologically to polypeptides encoded by a plurality of genes consisting of between W and X genes, and said plurality of genes comprising at least two genes in any of Panels A-R;
(d) a probe set comprising (a), (b) and/or (c); or
(e) a microarray comprising (a), (b), (c), and/or (d).

15. A kit comprising: reagents for sequencing nucleic acid molecules comprising one or more exons of a plurality of genes comprising a plurality of genes consisting of between W and X genes, said plurality of genes comprising at least two genes in any of Panels A-R; and instructions for using said reagents.

16-21. (canceled)

22. The method of claim 4, comprising correlating a difference between the determined sequences and the one or more reference sequences to a mutation in one or more of the genes in the plurality of genes.

23. The method of claim 22, wherein the reference sequence for any given gene in the plurality is any of the sequences corresponding to that gene as shown in Table 3.

24-25. (canceled)

26. The method of claim 4, comprising correlating a germline deficiency in any particular gene in the plurality of genes to an increased risk of a particular cancer as shown in Table 4.

27. The method of claim 4, comprising diagnosing the patient with an increased risk of a particular cancer as shown in Table 4 based at least in part on a germline deficiency in any particular gene in the plurality of genes.

28. The method of claim 4, comprising correlating no germline deficiency in any gene in the plurality of genes with no increased risk of any cancer.

29. (canceled)

30. The method of claim 4, wherein A=10, 11, 12, 13, 14, 15, 16, 17, 18, 19, 20, 25, 30, 35, 40, 45, 50, 60, 70, 80, 90, 100, 125, 150, 175, 200, 250, 300, 350, 400, 450, 500, 600, 700, 800, 900, 1,000, 1,250, 1,500, 1,750, 2,000, 2,500, 3,000, 3,500, 4,000, 5,000, 6,000, 7,000, 8,000, 9,000, 10,000, 12,000, 14,000, 16,000, 18,000, 20,000, 25,000, 30,000, 35,000, 40,000, 45,000, 50,000, 60,000, 70,000, 80,000, or 90,000, or more; and B=15, 16, 17, 18, 19, 20, 25, 30, 35, 40, 45, 50, 60, 70, 80, 90, 100, 125, 150, 175, 200, 250, 300, 350, 400, 450, 500, 600, 700, 800, 900, 1,000, 1,250, 1,500, 1,750, 2,000, 2,500, 3,000, 3,500, 4,000, 5,000, 6,000, 7,000, 8,000, 9,000, 10,000, 12,000, 14,000, 16,000, 18,000, 20,000, 25,000, 30,000, 35,000, 40,000, 45,000, 50,000, 60,000, 70,000, 80,000, 90,000, or 100,000 or more.

31. The method of claim 4, wherein said plurality of DNA molecules comprises at least some length of intronic sequence adjacent to at least one of said one or more exons.

32. The method of claim 31, wherein said plurality of DNA molecules comprises at least 1, 2, 3, 4, 5, 6, 7, 8, 9, 10, 15, 20, 25, 30, 35, 40, 45, 50, 60, 70, 80, 90, 100, 200, 300, 400, 500 or more base pairs of the intronic sequence on one or both sides of the at least one exon.

33. The method of claim 4, wherein W=2, 3, 4, 5, 6, 7, 8, 9, 10, 11, 12, 13, 14, 15, 16, 17, 18, 19, 20, 21, 22, 23, 24, 25, 26, 27, 28, 29, 30, 31, 32, 33, 34, 35, 36, 37, 38, 39, 40, 41, 42, 43, 44, 45, 46, 47, 48, 49, 50, 51, 52, 53, 54, 55, 56, 57, 58, 59, 60, 61, 62, 63, 64, 65, 66, 67, 68, or 69 or more; and X=3, 4, 5, 6, 7, 8, 9, 10, 11, 12, 13, 14, 15, 16, 17, 18, 19, 20, 25, 30, 35, 40, 45, 50, 60, 70, 80, 90, 100, 125, 150, 175, 200, 250, 300, 350, 400, 450, 500, 600, 700, 800, 900, 1,000, 1,250, 1,500, 1,750, 2,000, 2,500, 3,000, 3,500, 4,000, 5,000, 6,000, 7,000, 8,000, 9,000, 10,000, 12,000, 14,000, 16,000, 18,000, or 20,000 or more.

34. (canceled)

35. The method of claim 4, wherein said plurality of genes comprises at least 2, 3, 4, 5, 6, 7, 8, 9, 10, 11, 12, 13, 14, 15, 16, 17, 18, 19, 20, 21, 22, 23, 24, 25, 26, 27, 28, 29, 30, 31, 32, 33, 34, 35, 36, 37, 38, 39, 40, 41, 42, 43, 44, 45, 46, 47, 48, 49, 50, 51, 52, 53, 54, 55, 56, 57, 58, 59, 60, 61, 62, 63, 64, 65, 66, 67, 68, or 69 genes listed in any of Panels A-R.

36. (canceled)

37. The method of claim 4, wherein the plurality of genes comprises gene numbers between Y and Z of any of Panels A-R and Y=1, 2, 3, 4, 5, 6, 7, 8, 9, 10, 11, 12, 13, 14, 15, 16, 17, 18, 19, 20, 21, 22, 23, 24, 25, 26, 27, 28, 29, 30, 31, 32, 33, 34, 35, 36, 37, 38, 39, 40, 41, 42, 43, 44, 45, 46, 47, 48, 49, 50, 51, 52, 53, 54, 55, 56, 57, 58, 59, 60, 61, 62, 63, 64, 65, 66, 67 or 68 and Z=2, 3, 4, 5, 6, 7, 8, 9, 10, 11, 12, 13, 14, 15, 16, 17, 18, 19, 20, 21, 22, 23, 24, 25, 26, 27, 28, 29, 30, 31, 32, 33, 34, 35, 36, 37, 38, 39, 40, 41, 42, 43, 44, 45, 46, 47, 48, 49, 50, 51, 52, 53, 54, 55, 56, 57, 58, 59, 60, 61, 62, 63, 64, 65, 66, 67, 68, or 69.

38. The method of claim 4, wherein said plurality of genes comprises gene numbers 1 & 2, 2 & 3, 3 & 4, 4& 5, 5& 6, 6& 7, 7& 8, 8& 9, 9& 10, 10& 11, 11& 12, 12& 13, 13& 14, 14& 15, 15& 16, 16 & 17, 17 & 18, 18 & 19, 19 & 20, 20 & 21, 21 & 22, 22 & 23, 23 & 24, 24 & 25, 25 & 26, 26 & 27, 27 & 28, 28 & 29, 29 & 30, 30 & 31, 31 & 32, 32 & 33, 33 & 34, 34 & 35, 35 & 36, 36 & 37, 37 & 38, 38 & 39, 39 & 40, 40 & 41, 41 & 42, 42 & 43, 43 & 44, 44 & 45, 45 & 46, 46 & 47, 47 & 48, 48 & 49, 49 & 50, 50 & 51, 51 & 52, 52 & 53, 53 & 54, 54 & 55, 55 & 56, 56 & 57, 57 & 58, 58 & 59, 59 & 60, 60 & 61, 61 & 62, 62 & 63, 63 & 64, 64& 65, 65 & 66, 66 & 67, 67 & 68, or 68 & 69 of any of Panels A-R.

39. The method of claim 4, wherein the genes chosen from Panels A-R comprise at least 1%, 2%, 3%, 4%, 5%, 6%, 7%, 8%, 9%, 10%, 11%, 12%, 13%, 14%, 15%, 16%, 17%, 18%, 19%, 20%, 25%, 30%, 35%, 40%, 45%, 50%, 60%, 70%, 80%, 90%, 91%, 92%, 93%, 94%, 95%, 96%, 97%, 98%, 99%, or 100%, of the plurality of genes to be analyzed.

40-43. (canceled)
